(19) United States
(12) Patent Application Publication
(10) Pub. No.: US 2014/0242080 A1
(43) Pub. Date: Aug. 28, 2014

(54) BISPECIFIC T CELL ACTIVATING ANTIGEN BINDING MOLECULES

(71) Applicant: ROCHE GLYCART AG, Schlieren (CH)

(72) Inventors: Christiane Jaeger, Niederweningen (CH); Christian Klein, Bonstetten (CH); Ekkehard Moessner, Kreuzlingen (CH); Pablo Umana, Wollerau (CH)

(73) Assignee: ROCHE GLYCART AG, Schlieren (CH)

(21) Appl. No.: 14/188,516

(22) Filed: Feb. 24, 2014

(30) Foreign Application Priority Data
Feb. 26, 2013 (EP) 13156673.9

(51) Int. Cl. C07K 16/28

(52) U.S. Cl. CPC C07K 16/2809
USPC 424/136.1; 530/387.3; 536/23.53; 435/320.1; 435/328; 435/69.6; 435/375; 435/419; 435/252.3; 435/254.2

(57) ABSTRACT

The present invention generally relates to novel bispecific antigen binding molecules for T cell activation and re-direction to specific target cells. In addition, the present invention relates to polynucleotides encoding such bispecific antigen binding molecules, and vectors and host cells comprising such polynucleotides. The invention further relates to methods for producing the bispecific antigen binding molecules of the invention, and to methods of using these bispecific antigen binding molecules in the treatment of disease.

### FIELD OF THE INVENTION

[0001] The present invention generally relates to bispecific antigen binding molecules for activating T cells. In addition, the present invention relates to polynucleotides encoding such bispecific antigen binding molecules, and vectors and host cells comprising such polynucleotides. The invention further relates to methods for producing the bispecific antigen binding molecules of the invention, and to methods of using these bispecific antigen binding molecules in the treatment of disease.

### BACKGROUND

[0002] The selective destruction of an individual cell or a specific cell type is often desirable in a variety of clinical settings. For example, it is a primary goal of cancer therapy to specifically destroy tumor cells, while leaving healthy cells and tissues intact and undamaged.

[0003] An attractive way of achieving this is by inducing an immune response against the tumor, to make immune effector cells such as natural killer (NK) cells or cytotoxic T lymphocytes (CTLs) attack and destroy tumor cells. CTLs constitute the most potent effector cells of the immune system, however they cannot be activated by the effector mechanism mediated by the Fc domain of conventional therapeutic antibodies.

[0004] In this regard, bispecific antibodies designed to bind with one “arm” to a surface antigen on target cells, and with the second “arm” to an activating, invariant component of the T cell receptor (TCR) complex, have become of interest in recent years. The simultaneous binding of such an antibody to both of its targets will force a temporary interaction between target cell and T cell, causing activation of any cytotoxic T cell and subsequent lysis of the target cell. Hence, the immune response is re-directed to the target cells and is independent of peptide antigen presentation by the target cell or the specificity of the T cell as would be relevant for normal MHC-restricted activation of CTLs. In this context it is crucial that CTLs are only activated when a target cell is presenting the bispecific antibody to them, i.e. the immunological synapse is mimicked. Particularly desirable are bispecific antibodies that do not require lymphocyte preconditioning or co-stimulation in order to elicit efficient lysis of target cells.

[0005] Several bispecific antibody formats have been developed and their suitability for T cell mediated immunotherapy investigated. Out of these, the so-called BiTE (bispecific T cell engager) molecules have been very well characterized and already shown some promise in the clinic (reviewed in Nagorsen and Bäuerle, Exp Cell Res 317, 1255-1260 (2011)). BiTEs are tandem scFv molecules wherein two scFv molecules are fused by a flexible linker. Further bispecific formats being evaluated for T cell engagement include diabodies (Holliger et al., Prot Eng 9, 299-305 (1996)) and derivatives thereof, such as tandem diabodies (Kipriyanov et al., J Mol Biol 293, 41-66 (1999)). A more recent development are the so-called DART (dual affinity retargeting) molecules, which are based on the diabody format but feature a C-terminal disulfide bridge for additional stabilization (Moore et al., Blood 117, 4542-51 (2011)). The so-called triomabs, which are whole hybrid mouse/rat IgG molecules and also currently being evaluated in clinical trials, represent a larger sized format (reviewed in Seimetz et al., Cancer Treat Rev 36, 458-467 (2010)).

[0006] The variety of formats that are being developed shows the great potential attributed to T cell re-direction and activation in immunotherapy. The task of generating bispecific antibodies suitable therefor is, however, by no means trivial, but involves a number of challenges that have to be met related to efficacy, toxicity, applicability and produceability of the antibodies.

[0007] Small constructs such as, for example, BiTE molecules—while being able to efficiently crosslink effector and target cells—have a very short serum half life requiring them to be administered to patients by continuous infusion. IgG-like formats on the other hand—while having the great benefit of a long half life—suffer from toxicity associated with the native effector functions inherent to IgG molecules. Their immunogenic potential constitutes another unfavorable feature of IgG-like bispecific antibodies, especially non-human formats, for successful therapeutic development. Finally, a major challenge in the general development of bispecific antibodies has been the production of bispecific antibody constructs at a clinically sufficient quantity and purity, due to the mispairing of antibody heavy and light chains of different specificities upon co-expression, which decreases the yield of the correctly assembled construct and results in a number of non-functional side products from which the desired bispecific antibody may be difficult to separate.

[0008] Given the difficulties and disadvantages associated with currently available bispecific antibodies for T cell mediated immunotherapy, there remains a need for novel, improved formats of such molecules. The present invention provides bispecific antigen binding molecules designed for T cell activation and re-direction that combine good efficacy and produceability with low toxicity and favorable pharmacokinetic properties.

### SUMMARY OF THE INVENTION

[0009] In a first aspect the present invention provides a T cell activating bispecific antigen binding molecule comprising a first and a second antigen binding moiety, one of which is a Fab molecule capable of specific binding to an activating T cell antigen and the other one of which is a Fab molecule capable of specific binding to a target cell antigen, and an IgG4 Fc domain composed of a first and a second subunit capable of stable association; wherein the first antigen binding moiety is (a) a single chain Fab molecule wherein the Fab light chain and the Fab heavy chain are connected by a peptide linker, or (b) a crossover Fab molecule wherein either the variable or the constant regions of the Fab light chain and the Fab heavy chain are exchanged.

[0010] In a particular embodiment, not more than one antigen binding moiety capable of specific binding to an activating T cell antigen is present in the T cell activating bispecific antigen binding molecule (i.e. the T cell activating bispecific antigen binding molecule provides monovalent binding to the activating T cell antigen). In particular embodiments, the first antigen binding moiety is a crossover Fab molecule. In even more particular embodiments, the first antigen binding moiety is a crossover Fab molecule wherein the constant regions of the Fab light chain and the Fab heavy chain are exchanged.

[0011] In some embodiments, the first and the second antigen binding moiety of the T cell activating bispecific antigen binding molecule are fused to each other, optionally via a peptide linker. In one such embodiment, the second antigen binding moiety is fused at the C-terminus of the Fab heavy chain to the N-terminus of the Fab heavy chain of the first antigen binding moiety. In another such embodiment, the first antigen binding moiety is fused at the C-terminus of the Fab heavy chain to the N-terminus of the Fab heavy chain of the second antigen binding moiety. In yet another such embodiment, the second antigen binding moiety is fused at the C-terminus of the Fab light chain to the N-terminus of the Fab light chain of the first antigen binding moiety. In embodiments wherein the first antigen binding moiety is a crossover Fab molecule and wherein either (i) the second antigen binding moiety is fused at the C-terminus of the Fab heavy chain to the N-terminus of the Fab heavy chain of the first antigen binding moiety or (ii) the first antigen binding moiety is fused at the C-terminus of the Fab heavy chain to the N-terminus of the Fab heavy chain of the second antigen binding moiety, additionally the Fab light chain of the first antigen binding moiety and the Fab light chain of the second antigen binding moiety may be fused to each other, optionally via a peptide linker.

[0012] In one embodiment, the second antigen binding moiety of the T cell activating bispecific antigen binding molecule is fused at the C-terminus of the Fab heavy chain to the N-terminus of the first or the second subunit of the Fc domain. In another embodiment, the first antigen binding moiety is fused at the C-terminus of the Fab heavy chain to the N-terminus of the first or second subunit of the Fc domain.

[0013] In one embodiment, the first and the second antigen binding moiety of the T cell activating bispecific antigen binding molecule are each fused at the C-terminus of the Fab heavy chain to the N-terminus of one of the subunits of the Fc domain.

[0014] In certain embodiments, the T cell activating bispecific antigen binding molecule comprises a third antigen binding moiety which is a Fab molecule capable of specific binding to a target cell antigen. In one such embodiment, the third antigen binding moiety is fused at the C-terminus of the Fab heavy chain to the N-terminus of the first or second subunit of the Fc domain. In a particular embodiment, the second and the third antigen binding moiety of the T cell activating antigen binding molecule are each fused at the C-terminus of the Fab heavy chain to the N-terminus of one of the subunits of the Fc domain, and the first antigen binding moiety is fused at the C-terminus of the Fab heavy chain to the N-terminus of the Fab heavy chain of the second antigen binding moiety. In another particular embodiment, the first and the third antigen binding moiety of the T cell activating antigen binding molecule are each fused at the C-terminus of the Fab heavy chain to the N-terminus of one of the subunits of the Fc domain, and the second antigen binding moiety is fused at the C-terminus of the Fab heavy chain to the N-terminus of the Fab heavy chain of the first antigen binding moiety. The components of the T cell activating bispecific antigen binding molecule may be fused directly or through suitable peptide linkers. In one embodiment the second and the third antigen binding moiety and the Fc domain are part of an immunoglobulin molecule.

[0015] In a particular embodiment, the Fc domain is an IgG₄ Fc domain. In particular embodiments the Fc domain is a human IgG₄ Fc domain.

[0016] In particular embodiments the Fc domain comprises a modification promoting the association of the first and the second Fc domain subunit. In a specific such embodiment, an amino acid residue in the CH3 domain of the first subunit of the Fc domain is replaced with an amino acid residue having a larger side chain volume, thereby generating a protuberance within the CH3 domain of the first subunit which is positionable in a cavity within the CH3 domain of the second subunit, and an amino acid residue in the CH3 domain of the second subunit of the Fc domain is replaced with an amino acid residue having a smaller side chain volume, thereby generating a cavity within the CH3 domain of the second subunit within which the protuberance within the CH3 domain of the first subunit is positionable.

[0017] In a particular embodiment the Fc domain exhibits reduced binding affinity to an Fc receptor and/or reduced effector function, as compared to a native IgG₄ Fc domain. In certain embodiments the Fc domain is engineered to have reduced binding affinity to an Fc receptor and/or reduced effector function, as compared to a non-engineered Fc domain. In one embodiment, the Fc domain comprises one or more amino acid substitution that reduces binding to an Fc receptor and/or effector function. In one embodiment, the one or more amino acid substitution in the Fc domain that reduces binding to an Fc receptor and/or effector function is at one or more position selected from the group of L235, S228, and P329 (Kabat numbering). In one embodiment, the Fc domain of the T cell activating bispecific antigen binding molecule comprises the amino acid substitutions L235E and S228P (SPLE). In one embodiment, the Fc domain of the T cell activating bispecific antigen binding molecule comprises the amino acid substitutions L235E and S228P and P329G.

[0018] In one embodiment the Fc receptor for which binding is reduced is an Fcγ receptor. In one embodiment the Fc receptor is a human Fc receptor. In one embodiment, the Fc receptor is an activating Fc receptor. In a specific embodiment, the Fc receptor is human FcγRIIa, FcγRI, and/or FcγRIIIa. In one embodiment, the effector function is antibody-dependent cell-mediated cytotoxicity (ADCC).

[0019] In a particular embodiment, the activating T cell antigen that the bispecific antigen binding molecule is capable of binding is CD3. In other embodiments, the target cell antigen that the bispecific antigen binding molecule is capable of binding is a tumor cell antigen. In one embodiment, the target cell antigen is selected from the group consisting of: Melanoma-associated Chondroitin Sulfate Proteoglycan (MCSP), Epidermal Growth Factor Receptor (EGFR), Carcinoembryonic Antigen (CEA), Fibroblast Activation Protein (FAP), CD19, CD20 and CD33.

[0020] In another embodiment, the T cell activating bispecific antigen binding molecule comprises a first antigen binding moiety capable of specific binding to CD3, a second antigen binding moiety capable of binding to MCSP, and an IgG₄ Fc domain. In one such embodiment, the antigen binding molecule comprises the amino acid sequences of SEQ ID NOs 278, 319, 369, and 370 or comprises the amino acid sequences of SEQ ID NOs 278, 319, 371, and 372.

[0021] According to another aspect of the invention there is provided an isolated polynucleotide encoding a T cell activating bispecific antigen binding molecule of the invention or a fragment thereof. The invention also encompasses polypeptides encoded by the polynucleotides of the invention. The invention further provides an expression vector comprising the isolated polynucleotide of the invention, and a host cell comprising the isolated polynucleotide or the expression vector of the invention. In some embodiments the host cell is a eukaryotic cell, particularly a mammalian cell.

[0022] In another aspect is provided a method of producing the T cell activating bispecific antigen binding molecule of the invention, comprising the steps of a) culturing the host cell of the invention under conditions suitable for the expression of the T cell activating bispecific antigen binding molecule and b) recovering the T cell activating bispecific antigen binding molecule. The invention also encompasses a T cell activating bispecific antigen binding molecule produced by the method of the invention.

[0023] The invention further provides a pharmaceutical composition comprising the T cell activating bispecific antigen binding molecule of the invention and a pharmaceutically acceptable carrier. Also encompassed by the invention are methods of using the T cell activating bispecific antigen binding molecule and pharmaceutical composition of the invention. In one aspect the invention provides a T cell activating bispecific antigen binding molecule or a pharmaceutical composition of the invention for use as a medicament. In one aspect is provided a T cell activating bispecific antigen binding molecule or a pharmaceutical composition according to the invention for use in the treatment of a disease in an individual in need thereof. In a specific embodiment the disease is cancer.

[0024] Also provided is the use of a T cell activating bispecific antigen binding molecule of the invention for the manufacture of a medicament for the treatment of a disease in an individual in need thereof; as well as a method of treating a disease in an individual, comprising administering to said individual a therapeutically effective amount of a composition comprising the T cell activating bispecific antigen binding molecule according to the invention in a pharmaceutically acceptable form. In a specific embodiment the disease is cancer. In any of the above embodiments the individual preferably is a mammal, particularly a human.

[0025] The invention also provides a method for inducing lysis of a target cell, particularly a tumor cell, comprising contacting a target cell with a T cell activating bispecific antigen binding molecule of the invention in the presence of a T cell, particularly a cytotoxic T cell.

### BRIEF DESCRIPTION OF THE DRAWINGS

[0026] FIG. 1. Exemplary configurations of the T cell activating bispecific antigen binding molecules of the invention. Illustration of (A) the “1+1 IgG scFab, one armed”, and (B) the “1+1 IgG scFab, one armed inverted” molecule. In the “1+1 IgG scFab, one armed” molecule the light chain of the T cell targeting Fab is fused to the heavy chain by a linker, while the “1+1 IgG scFab, one armed inverted” molecule has the linker in the tumor targeting Fab. (C) Illustration of the “2+1 IgG scFab” molecule. (D) Illustration of the “1+1 IgG scFab” molecule. (E) Illustration of the “1+1 IgG Crossfab” molecule. (F) Illustration of the “2+1 IgG Crossfab” molecule. (G) Illustration of the “2+1 IgG Crossfab” molecule with alternative order of Crossfab and Fab components (“inverted”). (H) Illustration of the “1+1 IgG Crossfab light chain (LC) fusion” molecule. (I) Illustration of the “1+1 CrossMab” molecule. (J) Illustration of the “2+1 IgG Crossfab, linked light chain” molecule. (K) Illustration of the “1+1 IgG Crossfab, linked light chain” molecule. (L) Illustration of the “2+1 IgG Crossfab, inverted, linked light chain” molecule. (M) Illustration of the “1+1 IgG Crossfab, inverted, linked light chain” molecule. Black dot: optional modification in the Fc domain promoting heterodimerization.

[0027] FIG. 2. SDS PAGE (4-12% Bis/Tris, NuPage Invitrogen, Coomassie-stained) of “1+1 IgG scFab, one armed” (anti-MCSP/anti-huCD3) (see SEQ ID NOs 1, 3, 5), non reduced (A) and reduced (B), and of “1+1 IgG scFab, one armed inverted” (anti-MCSP/anti-huCD3) (see SEQ ID NOs 7, 9, 11), non reduced (C) and reduced (D).

[0028] FIG. 3. Analytical size exclusion chromatography (Superdex 200 10/300 GL GE Healthcare; 2 mM MOPS pH 7.3, 150 mM NaCl, 0.02% (w/v) NaCl; 50 μg sample injected) of “1+1 IgG scFab, one armed” (anti-MCSP/anti-huCD3) (see SEQ ID NOs 1, 3, 5) (A) and “1+1 IgG scFab, one armed inverted” (anti-MCSP/anti-huCD3) (see SEQ ID NOs 7, 9, 11) (B).

[0029] FIG. 4. SDS PAGE (4-12% Bis/Tris, NuPage Invitrogen, Coomassie-stained) of “1+1 IgG scFab, one armed” (anti-EGFR/anti-huCD3) (see SEQ ID NOs 43, 45, 57), non reduced (A) and reduced (B), and of “1+1 IgG scFab, one armed inverted” (anti-EGFR/anti-huCD3) (see SEQ ID NOs 11, 49, 51), non reduced (C) and reduced (D).

[0030] FIG. 5. Analytical size exclusion chromatography (Superdex 200 10/300 GL GE Healthcare; 2 mM MOPS pH 7.3, 150 mM NaCl, 0.02% (w/v) NaCl; 50 μg sample injected) of “1+1 IgG scFab, one armed” (anti-EGFR/anti-huCD3) (see SEQ ID NOs 43, 45, 47) (A) and “1+1 IgG scFab, one armed inverted” (anti-EGFR/anti-huCD3) (see SEQ ID NOs 11, 49, 51) (B).

[0031] FIG. 6. (A, B) SDS PAGE (4-12% Bis/Tris, NuPage Invitrogen, Coomassie-stained) of “1+1 IgG scFab, one armed inverted” (anti-FAP/anti-huCD3) (see SEQ ID NOs 11, 51, 55), non reduced (A) and reduced (B). (C) Analytical size exclusion chromatography (Superdex 200 10/300 GL GE Healthcare; 2 mM MOPS pH 7.3, 150 mM NaCl, 0.02% (w/v) NaCl; 50 μg sample injected) of “1+1 IgG scFab, one armed inverted” (anti-FAP/anti-huCD3).

[0032] FIG. 7. SDS PAGE (4-12% Bis/Tris, NuPage Invitrogen, Coomassie-stained) of (A) “2+1 IgG scFab, P329G LALA” (anti-MCSP/anti-huCD3) (see SEQ ID NOs 5, 21, 23), non reduced (lane 2) and reduced (lane 3); of (B) “2+1 IgG scFab, LALA” (anti-MCSP/anti-huCD3) (see SEQ ID NOs 5, 17, 19), non reduced (lane 2) and reduced (lane 3); of (C) “2+1 IgG scFab, wt” (anti-MCSP/anti-huCD3) (see SEQ ID NOs 5, 13, 15), non reduced (lane 2) and reduced (lane 3); and of (D) “2+1 IgG scFab, P329G LALA N297D” (anti-MCSP/anti-huCD3) (see SEQ ID NOs 5, 25, 27), non reduced (lane 2) and reduced (lane 3).

[0033] FIG. 8. Analytical size exclusion chromatography (Superdex 200 10/300 GL GE Healthcare; 2 mM MOPS pH 7.3, 150 mM NaCl, 0.02% (w/v) NaCl; 50 μg sample injected) of (A) “2+1 IgG scFab, P329G LALA” (anti-MCSP/anti-huCD3) (see SEQ ID NOs 5, 21, 23); of (B) “2+1 IgG scFab, LALA” (anti-MCSP/anti-huCD3) (see SEQ ID NOs 5, 17, 19); of (C) “2+1 IgG scFab, wt” (anti-MCSP/anti-huCD3) (see SEQ ID NOs 5, 13, 15); and of (D) “2+1 IgG scFab, P329G LALA N297D” (anti-MCSP/anti-huCD3) (see SEQ ID NOs 5, 25, 27).

[0034] FIG. 9. (A, B) SDS PAGE (4-12% Bis/Tris, NuPage Invitrogen, Coomassie-stained) of “2+1 IgG scFab, P329G LALA” (anti-EGFR/anti-huCD3) (see SEQ ID NOs 45, 47, 53), non reduced (A) and reduced (B). (C) Analytical size exclusion chromatography (Superdex 200 10/300 GL GE Healthcare; 2 mM MOPS pH 7.3, 150 mM NaCl, 0.02% (w/v) NaCl; 50 μg sample injected) of “2+1 IgG scFab, P329G LALA” (anti-EGFR/anti-huCD3).

[0035] FIG. 10. (A, B) SDS PAGE (4-12% Bis/Tris, NuPage Invitrogen, Coomassie-stained) of “2+1 IgG scFab, P329G LALA” (anti-FAP/anti-huCD3) (see SEQ ID NOs 57, 59, 61), non reduced (A) and reduced (B). (C) Analytical size exclusion chromatography (Superdex 200 10/300 GL GE Healthcare; 2 mM MOPS pH 7.3, 150 mM NaCl, 0.02% (w/v) NaCl; 50 μg sample injected) of “2+1 IgG scFab, P329G LALA” (anti-FAP/anti-huCD3).

[0036] FIG. 11. (A, B) SDS PAGE (4-12% Tris-Acetate (A) or 4-12% Bis/Tris (B), NuPage Invitrogen, Coomassie-stained) of “1+1 IgG Crossfab, Fc(hole) P329G LALA/Fc(knob) wt” (anti-MCSP/anti-huCD3) (see SEQ ID NOs 5, 29, 31, 33), non reduced (A) and reduced (B). (C) Analytical size exclusion chromatography (Superdex 200 10/300 GL GE Healthcare; 2 mM MOPS pH 7.3, 150 mM NaCl, 0.02% (w/v) NaCl; 50 μg sample injected) of “1+1 IgG Crossfab, Fc(hole) P329G LALA/Fc(knob) wt” (anti-MCSP/anti-huCD3).

[0037] FIG. 12. (A, B) SDS PAGE (4-12% Bis/Tris, NuPage Invitrogen, Coomassie-stained) of “2+1 IgG Crossfab” (anti-MCSP/anti-huCD3) (see SEQ ID NOs 3, 5, 29, 33), non reduced (A) and reduced (B). (C) Analytical size exclusion chromatography (Superdex 200 10/300 GL GE Healthcare; 2 mM MOPS pH 7.3, 150 mM NaCl, 0.02% (w/v) NaCl; 50 μg sample injected) of “2+1 IgG Crossfab” (anti-MCSP/anti-huCD3).

[0038] FIG. 13. (A, B) SDS PAGE (4-12% Bis/Tris, NuPage Invitrogen, Coomassie-stained) of “2+1 IgG Crossfab” (anti-MCSP/anti-cyCD3) (see SEQ ID NOs 3, 5, 35, 37), non reduced (A) and reduced (B). (C) Analytical size exclusion chromatography (Superdex 200 10/300 GL GE Healthcare; 2 mM MOPS pH 7.3, 150 mM NaCl, 0.02% (w/v) NaCl; 50 μg sample injected) of “2+1 IgG Crossfab” (anti-MCSP/anti-cyCD3).

[0039] FIG. 14. (A, B) SDS PAGE (4-12% Bis/Tris, NuPage Invitrogen, Coomassie-stained) of “2+1 IgG Crossfab, inverted” (anti-CEA/anti-huCD3) (see SEQ ID NOs 33, 63, 65, 67), non reduced (A) and reduced (B). (C) Analytical size exclusion chromatography (Superdex 200 10/300 GL GE Healthcare; 2 mM MOPS pH 7.3, 150 mM NaCl, 0.02% (w/v) NaCl; 50 μg sample injected) of “2+1 IgG Crossfab, inverted” (anti-CEA/anti-huCD3).

[0040] FIG. 15. (A) Thermal stability of “(scFv)₂-Fc” and “(dsscFv)₂-Fc” (anti-MCSP (LC007)/anti-huCD3 (V9)). Dynamic Light Scattering, measured in a temperature ramp from 25-75° C. at 0.05° C./min. Black curve: “(scFv)₂-Fc”; grey curve: “(dsscFv)₂-Fc”. (B) Thermal stability of “2+1 IgG scFab” (see SEQ ID NOs 5, 21, 23) and “2+1 IgG Crossfab” (anti-MCSP/anti-huCD3) (see SEQ ID NOs 3, 5, 29, 33). Dynamic Light Scattering, measured in a temperature ramp from 25-75° C. at 0.05° C./min. Black curve: “2+1 IgG scFab”; grey curve: “2+1 IgG Crossfab”.

[0041] FIG. 16. Biacore assay setup for (A) determination of interaction of various Fc-mutants with human FcγRIIIa, and for (B) simultaneous binding of T cell bespecific constructs with tumor target and human CD3γ(G₄S)₅CD3ε-AcTev-Fc(knob)-Avi/Fc(hole).

[0042] FIG. 17. Simultaneous binding of T-cell bispecific constructs to the D3 domain of human MCSP and human CD3γ(G₄S)₅CD3ε-AcTev-Fc(knob)-Avi/Fc(hole). (A) “2+1 IgG Crossfab” (see SEQ ID NOs 3, 5, 29, 33), (B) “2+1 IgG scFab” (see SEQ ID NOs 5, 21, 23).

[0043] FIG. 18. Simultaneous binding of T-cell bispecific constructs to human EGFR and human CD3γ(G₄S)₅CD3ε-AcTev-Fc(knob)-Avi/Fc(hole). (A) “2+1 IgG scFab” (see SEQ ID NOs 45, 47, 53), (B) “1+1 IgG scFab, one armed” (see SEQ ID NOs 43, 45, 47), (C) “1+1 IgG scFab, one armed inverted” (see SEQ ID NOs 11, 49, 51), and (D) “1+1 IgG scFab” (see SEQ ID NOs 47, 53, 213).

[0044] FIG. 19. Binding of the “(scFv)₂” molecule (50 nM) to CD3 expressed on Jurkat cells (A), or to MCSP on Colo-38 cells (B) measured by FACS. Mean fluorescence intensity compared to untreated cells and cells stained with the secondary antibody only is depicted.

[0045] FIG. 20. Binding of the “2+1 IgG scFab, LALA” (see SEQ ID NOs 5, 17, 19) construct (50 nM) to CD3 expressed on Jurkat cells (A), or to MCSP on Colo-38 cells (B) measured by FACS. Mean fluorescence intensity compared to cells treated with the reference anti-CD3 IgG (as indicated), untreated cells, and cells stained with the secondary antibody only is depicted.

[0046] FIG. 21. Binding of the “1+1 IgG scFab, one armed” (see SEQ ID NOs 1, 3, 5) and “1+1 IgG scFab, one armed inverted” (see SEQ ID NOs 7, 9, 11) constructs (50 nM) to CD3 expressed on Jurkat cells (A), or to MCSP on Colo-38 cells (B) measured by FACS. Mean fluorescence intensity compared to cells treated with the reference anti-CD3 or anti-MCSP IgG (as indicated), untreated cells, and cells stained with the secondary antibody only is depicted.

[0047] FIG. 22. Dose dependent binding of the “2+1 IgG scFab, LALA” (see SEQ ID NOs 5, 17, 19) bispecific construct and the corresponding anti-MCSP IgG to MCSP on Colo-38 cells as measured by FACS.

[0048] FIG. 23. Surface expression level of different activation markers on human T cells after incubation with 1 nM of “2+1 IgG scFab, LALA” (see SEQ ID NOs 5, 17, 19) or “(scFv)₂” CD3-MCSP bispecific constructs in the presence or absence of Colo-38 tumor target cells, as indicated (E:T ratio of PBMCs to tumor cells=10:1). Depicted is the expression level of the early activation marker CD69 (A), or the late activation marker CD25 (B) on CD8⁺ T cells after 15 or 24 hours incubation, respectively.

[0049] FIG. 24. Surface expression level of the late activation marker CD25 on human T cells after incubation with 1 nM of “2+1 IgG scFab, LALA” (see SEQ ID NOs 5, 17, 19) or “(scFv)₂” CD3-MCSP bispecific constructs in the presence or absence of Colo-38 tumor target cells, as indicated (E:T ratio=5:1). Depicted is the expression level of the late activation marker CD25 on CD8⁺ T cells (A) or on CD4⁺ T cells (B) after 5 days incubation.

[0050] FIG. 25. Surface expression level of the late activation marker CD25 on cynomolgus CD8⁺ T cells from two different animals (cyno Nestor, cyno Nobu) after 43 hours incubation with the indicated concentrations of the “2+1 IgG Crossfab” bispecific construct (targeting cynomolgus CD3 and human MCSP; see SEQ ID NOs 3, 5, 35, 37), in the presence or absence of human MCSP-expressing MV-3 tumor target cells (E:T ratio=3:1). As controls, the reference IgGs (anti-cynomolgus CD3 IgG, anti-human MCSP IgG) or the unphysiologic stimulus PHA-M were used.

[0051] FIG. 26. IFN-γ levels, secreted by human pan T cells that were activated for 18.5 hours by the “2+1 IgG scFab, LALA” CD3-MCSP bispecific construct (see SEQ ID NOs 5, 17, 19) in the presence of U87MG tumor cells (E:T ratio=5:1). As controls, the corresponding anti-CD3 and anti-MCSP IgGs were administered.

[0052] FIG. 27. Killing (as measured by LDH release) of MDA-MB-435 tumor cells upon co-culture with human pan T cells (E:T ratio=5:1) and activation for 20 hours by different concentrations of the “2+1 IgG scFab” (see SEQ ID NOs 5, 21, 23), “2+1 IgG Crossfab” (see SEQ ID NOs 3, 5, 29, 33) and “(scFv)₂” bispecific molecules and corresponding IgGs.

[0053] FIG. 28. Killing (as measured by LDH release) of MDA-MB-435 tumor cells upon co-culture with human pan T cells (E:T ratio=5:1), and activation for 20 hours by different concentrations of the bispecific constructs and corresponding IgGs. “2+1 IgG scFab” constructs differing in their Fc-domain (having either a wild-type Fc domain (see SEQ ID NOs 5, 13, 15), or a Fc-domain mutated to abolish (NK) effector cell function: P329G LALA (see SEQ ID NOs 5, 21, 23), P329G LALA N297D (see SEQ ID NOs 5, 25, 27)) and the “2+1 IgG Crossfab” (see SEQ ID NOs 3, 5, 29, 33) construct were compared.

[0054] FIG. 29. Killing (as measured by LDH release) of Colo-38 tumor cells upon co-culture with human pan T cells (E:T ratio=5:1), treated with CD3-MCSP bispecific “2+1 IgG scFab, LALA” (see SEQ ID NOs 5, 17, 19) construct, “(scFv)₂” molecule or corresponding IgGs for 18.5 hours.

[0055] FIG. 30. Killing (as measured by LDH release) of Colo-38 tumor cells upon co-culture with human pan T cells (E:T ratio=5:1), treated with CD3-MCSP bispecific “2+1 IgG scFab, LALA” (see SEQ ID NOs 5, 17, 19) construct, the “(scFv)₂” molecule or corresponding IgGs for 18 hours.

[0056] FIG. 31. Killing (as measured by LDH release) of MDA-MB-435 tumor cells upon co-culture with human pan T cells (E:T ratio=5:1), and activation for 23.5 hours by different concentrations of the CD3-MCSP bispecific “2+1 IgG scFab, LALA” (see SEQ ID NOs 5, 17, 19) construct, “(scFv)₂” molecule or corresponding IgGs.

[0057] FIG. 32. Killing (as measured by LDH release) of Colo-38 tumor cells upon co-culture with human pan T cells (E:T ratio=5:1) and activation for 19 hours by different concentrations of the CD3-MCSP bispecific “1+1 IgG scFab, one armed” (see SEQ ID NOs 1, 3, 5), “1+1 IgG scFab, one armed inverted” (see SEQ ID NOs 7, 9, 11) or “(scFv)₂” constructs, or corresponding IgGs.

[0058] FIG. 33. Killing (as measured by LDH release) of Colo-38 tumor cells upon co-culture with human pan T cells (E:T ratio=5:1), treated with “1+1 IgG scFab” CD3-MCSP bispecific construct (see SEQ ID NOs 5, 21, 213) or “(scFv)₂” molecule for 20 hours.

[0059] FIG. 34. Killing (as measured by LDH release) of MDA-MB-435 tumor cells upon co-culture with human pan T cells (E:T ratio=5:1), and activation for 21 hours by different concentrations of the bispecific constructs and corresponding IgGs. The CD3-MCSP bispecific “2+1 IgG Crossfab” (see SEQ ID NOs 3, 5, 29, 33) and “1+1 IgG Crossfab” (see SEQ ID NOs 5, 29, 31, 33) constructs, the “(scFv)₂” molecule and corresponding IgGs were compared.

[0060] FIG. 35. Killing (as measured by LDH release) of different target cells (MCSP-positive Colo-38 tumor target cells, mesenchymal stem cells derived from bone marrow or adipose tissue, or pericytes from placenta; as indicated) induced by the activation of human T cells by 135 ng/ml or 1.35 ng/ml of the “2+1 IgG Crossfab” CD3-MCSP bispecific construct (see SEQ ID NOs 3, 5, 29, 33) (E:T ratio=25:1).

[0061] FIG. 36. Killing (as measured by LDH release) of Colo-38 tumor target cells, measured after an overnight incubation of 21 h, upon co-culture with human PBMCs and different CD3-MCSP bispecific constructs (“2+1 IgG scFab, LALA” (see SEQ ID NOs 5, 17, 19) and “(scFv)₂”) or a glycoengineered anti-MCSP IgG (GlycoMab). The effector to target cell ratio was fixed at 25:1 (A), or varied as depicted (B). PBMCs were isolated from fresh blood (A) or from a Buffy Coat (B).

[0062] FIG. 37. Time-dependent cytotoxic effect of the “2+1 IgG Crossfab” construct, targeting cynomolgus CD3 and human MCSP (see SEQ ID NOs 3, 5, 35, 37). Depicted is the LDH release from human MCSP-expressing MV-3 cells upon co-culture with primary cynomolgus PBMCs (E:T ratio=3:1) for 24 h or 43 h. As controls, the reference IgGs (anti-cyno CD3 IgG and anti-human MCSP IgG) were used at the same molarity. PHA-M served as a control for (unphysiologic) T cell activation.

[0063] FIG. 38. Killing (as measured by LDH release) of huMCSP-positive MV-3 melanoma cells upon co-culture with human PBMCs (E:T ratio=10:1), treated with different CD3-MCSP bispecific constructs (“2+1 IgG Crossfab” (see SEQ ID NOs 3, 5, 29, 33) and “(scFv)₂”) for ˜26 hours.

[0064] FIG. 39. Killing (as measured by LDH release) of EGFR-positive LS-174T tumor cells upon co-culture with human pan T cells (E:T ratio=5:1), treated with different CD3-EGFR bispecific constructs (“2+1 IgG scFab” (see SEQ ID NOs 45, 47, 53), “1+1 IgG scFab” (see SEQ ID NOs 47, 53, 213) and “(scFv)₂”) or reference IgGs for 18 hours.

[0065] FIG. 40. Killing (as measured by LDH release) of EGFR-positive LS-174T tumor cells upon co-culture with human pan T cells (E:T ratio=5:1), treated with different CD3-EGFR bispecific constructs (“1+1 IgG scFab, one armed” (see SEQ ID NOs 43, 45, 47), “1+1 IgG scFab, one armed inverted” (see SEQ ID NOs 11, 49, 51), “1+1 IgG scFab” (see SEQ ID NOs 47, 53, 213) and “(scFv)₂”) or reference IgGs for 21 hours.

[0066] FIG. 41. Killing (as measured by LDH release) of EGFR-positive LS-174T tumor cells upon co-culture with either human pan T cells (A) or human naive T cells (B), treated with different CD3-EGFR bispecific constructs (“1+1 IgG scFab, one armed” (see SEQ ID NOs 43, 45, 47), “1+1 IgG scFab, one armed inverted” (see SEQ ID NOs 11, 49, 51) and “(scFv)₂”) or reference IgGs for 16 hours. The effector to target cell ratio was 5:1.

[0067] FIG. 42. Killing (as measured by LDH release) of FAP-positive GM05389 fibroblasts upon co-culture with human pan T cells (E:T ratio=5:1), treated with different CD3-FAP bispecific constructs (“1+1 IgG scFab, one armed inverted” (see SEQ ID NOs 11, 51, 55), “1+1 IgG scFab” (see SEQ ID NOs 57, 61, 213), “2+1 IgG scFab” (see SEQ ID NOs 57, 59, 61) and “(scFv)₂”) for ˜18 hours.

[0068] FIG. 43. Flow cytrometric analysis of expression levels of CD107a/b, as well as perforin levels in CD8⁺ T cells that have been treated with different CD3-MCSP bispecific constructs (“2+1 IgG scFab, LALA” (see SEQ ID NOs 5, 17, 19) and “(scFv)₂”) or corresponding control IgGs in the presence (A) or absence (B) of target cells for 6 h. Human pan T cells were incubated with 9.43 nM of the different molecules in the presence or absence of Colo-38 tumor target cells at an effector to target ratio of 5:1. Monensin was added after the first hour of incubation to increase intracellular protein levels by preventing protein transport. Gates were set either on all CD107a/b positive, perforin-positive or double-positive cells, as depicted.

[0069] FIG. 44. Relative proliferation of either CD8⁺ (A) or CD4⁺ (B) human T cells upon incubation with 1 nM of different CD3-MCSP bispecific constructs (“2+1 IgG scFab, LALA” (see SEQ ID NOs 5, 17, 19) or “(scFv)₂”) or corresponding control IgGs in the presence or absence of Colo-38 tumor target cells at an effector to target cell ratio of 5:1. CFSE-labeled human pan T cells were characterized by FACS. The relative proliferation level was determined by setting a gate around the non-proliferating cells and using the cell number of this gate relative to the overall measured cell number as the reference.

[0070] FIG. 45. Levels of different cytokines measured in the supernatant of human PBMCs after treatment with 1 nM of different CD3-MCSP bispecific constructs (“2+1 IgG scFab, LALA” (see SEQ ID NOs 5, 17, 19) or “(scFv)₂”) or corresponding control IgGs in the presence (A) or absence (B) of Colo-38 tumor cells for 24 hours. The effector to target cell ratio was 10:1.

[0071] FIG. 46. Levels of different cytokines measured in the supernatant of whole blood after treatment with 1 nM of different CD3-MCSP bispecific constructs (“2+1 IgG scFab”, “2+1 IgG Crossfab” (see SEQ ID NOs 3, 5, 29, 33) or “(scFv)₂”) or corresponding control IgGs in the presence (A, B) or absence (C, D) of Colo-38 tumor cells for 24 hours. Among the bispecific constructs were different “2+1 IgG scFab” constructs having either a wild-type Fc domain (see SEQ ID NOs 5, 13, 15), or an Fc domain mutated to abolish (NK) effector cell function (LALA (see SEQ ID NOs 5, 17, 19), P329G LALA (see SEQ ID NOs 5, 2, 23) and P329G LALA N297D (see SEQ ID NOs 5, 25, 27)).

[0072] FIG. 47. CE-SDS analyses. Electropherogram shown as SDS PAGE of 2+1 IgG Crossfab, linked light chain (see SEQ ID NOs 3, 5, 29, 179). (lane 1: reduced, lane 2: non-reduced).

[0073] FIG. 48. Analytical size exclusion chromatography of 2+1 IgG Crossfab, linked light chain (see SEQ ID NOs 3, 5, 29, 179) (final product). 20 μg sample were injected.

[0074] FIG. 49. Killing (as measured by LDH release) of MCSP-positive MV-3 tumor cells upon co-culture by human PBMCs (E:T ratio=10:1), treated with different CD3-MCSP bispecific constructs for ˜44 hours (“2+1 IgG Crossfab” (see SEQ ID NOs 3, 5, 29, 33) and “2+1 IgG Crossfab, linked LC” (see SEQ ID NOs 3, 5, 29, 179)). Human PBMCs were isolated from fresh blood of healthy volunteers.

[0075] FIG. 50. Killing (as measured by LDH release) of MCSP-positive Colo-38 tumor cells upon co-culture by human PBMCs (E:T ratio=10:1), treated with different CD3-MCSP bispecific constructs for ˜22 hours (“2+1 IgG Crossfab” (see SEQ ID NOs 3, 5, 29, 33) and “2+1 IgG Crossfab, linked LC” (see SEQ ID NOs 3, 5, 29, 179)). Human PBMCs were isolated from fresh blood of healthy volunteers.

[0076] FIG. 51. Killing (as measured by LDH release) of MCSP-positive Colo-38 tumor cells upon co-culture by human PBMCs (E:T ratio=10:1), treated with different CD3-MCSP bispecific constructs for ˜22 hours (“2+1 IgG Crossfab” (see SEQ ID NOs 3, 5, 29, 33) and “2+1 IgG Crossfab, linked LC” (see SEQ ID NOs 3, 5, 29, 179)). Human PBMCs were isolated from fresh blood of healthy volunteers.

[0077] FIG. 52. Killing (as measured by LDH release) of MCSP-positive WM266-4 cells upon co-culture by human PBMCs (E:T ratio=10:1), treated with different CD3-MCSP bispecific constructs for ˜22 hours (“2+1 IgG Crossfab” (see SEQ ID NOs 3, 5, 29, 33) and “2+1 IgG Crossfab, linked LC” (see SEQ ID NOs 3, 5, 29, 179)). Human PBMCs were isolated from fresh blood of healthy volunteers.

[0078] FIG. 53. Surface expression level of the early activation marker CD69 (A) and the late activation marker CD25 (B) on human CD8⁺ T cells after 22 hours incubation with 10 nM, 80 pM or 3 pM of different CD3-MCSP bispecific constructs (“2+1 IgG Crossfab” (see SEQ ID NOs 3, 5, 29, 33) and “2+1 IgG Crossfab, linked LC” (see SEQ ID NOs 3, 5, 29, 179)) in the presence or absence of human MCSP-expressing Colo-38 tumor target cells (E:T ratio=10:1).

[0079] FIG. 54. CE-SDS analyses. (A) Electropherogram shown as SDS-PAGE of 1+1 IgG Crossfab; VL/VH exchange (LC007N9) (see SEQ ID NOs 5, 29, 33, 181): a) non-reduced, b) reduced. (B) Electropherogram shown as SDS-PAGE of 1+1 CrossMab; CL/CH1 exchange (LC007/V9) (see SEQ ID NOs 5, 23, 183, 185): a) reduced, b) non-reduced. (C) Electropherogram shown as SDS-PAGE of 2+1 IgG Crossfab, inverted; CL/CH1 exchange (LC007/V9) (see SEQ ID NOs 5, 23, 183, 187): a) reduced, b) non-reduced. (D) Electropherogram shown as SDS-PAGE of 2+1 IgG Crossfab; VL/VH exchange (M4-3 ML2/V9) (see SEQ ID NOs 33, 189, 191, 193): a) reduced, b) non-reduced. (E) Electropherogram shown as SDS-PAGE of 2+1 IgG Crossfab; CL/CH1 exchange (M4-3 ML2/V9) (see SEQ ID NOs 183, 189, 193, 195): a) reduced, b) non-reduced. (F) Electropherogram shown as SDS-PAGE of 2+1 IgG Crossfab, inverted; CL/CH1 exchange (CH1A1A/V9) (see SEQ ID NOs 65, 67, 183, 197): a) reduced, b) non-reduced. (G) Electropherogram shown as SDS-PAGE of 2+1 IgG Crossfab; CL/CH1 exchange (M4-3 ML2/H2C) (see SEQ ID NOs 189, 193, 199, 201): a) reduced, b) non-reduced. (H) Electropherogram shown as SDS-PAGE of 2+1 IgG Crossfab, inverted; CL/CH1 exchange (431/26/V9) (see SEQ ID NOs 183, 203, 205, 207): a) reduced, b) non-reduced. (I) Electropherogram shown as SDS-PAGE of “2+1 IgG Crossfab light chain fusion” (CH1A1A/V9) (see SEQ ID NOs 183, 209, 211, 213): a) reduced, b) non-reduced. (J) SDS PAGE (4-12% Bis/Tris, NuPage Invitrogen, Coomassie-stained) of “2+1 IgG Crossfab” (anti-MCSP/anti-huCD3) (see SEQ ID NOs 5, 23, 215, 217), non-reduced (left) and reduced (right). (K) Electropherogram shown as SDS-PAGE of “2+1 IgG Crossfab, inverted” (anti-MCSP/anti-huCD3) (see SEQ ID NOs 5, 23, 215, 219): a) reduced, b) non-reduced. (L) SDS PAGE (4-12% Bis/Tris, NuPage Invitrogen, Coomassie-stained) of “1+1 IgG Crossfab” (anti-CD33/anti-huCD3) (see SEQ ID NOs 33, 213, 221, 223), reduced (left) and non-reduced (right). (M) SDS PAGE (4-12% Bis/Tris, NuPage Invitrogen, Coomassie-stained) of “2+1 IgG Crossfab” (anti-CD33/anti-huCD3) (see SEQ ID NOs 33, 221, 223, 225), reduced (left) and non-reduced (right). (N) SDS PAGE (4-12% Bis/Tris, NuPage Invitrogen, Coomassie-stained) of “2+1 IgG Crossfab” (anti-CD20/anti-huCD3) (see SEQ ID NOs 33, 227, 229, 231), non-reduced.

[0080] FIG. 55. Binding of bispecific constructs (CEA/CD3 “2+1 IgG Crossfab, inverted (VL/VH)” (see SEQ ID NOs 33, 63, 65, 67) and “2+1 IgG Crossfab, inverted (CL/CH1)” (see SEQ ID NOs 65, 67, 183, 197)) to human CD3, expressed by Jurkat cells (A), or to human CEA, expressed by LS-174T cells (B) as determined by FACS. As a control, the equivalent maximum concentration of the reference IgGs and the background staining due to the labeled 2ndary antibody (goat anti-human FITC-conjugated AffiniPure F(ab′)2 Fragment, Fcγ Fragment-specific, Jackson Immuno Research Lab #109-096-098) were assessed as well.

[0081] FIG. 56. Binding of bispecific constructs (MCSP/CD3 “2+1 IgG Crossfab” (see SEQ ID NOs 3, 5, 29, 33) and “2+1 IgG Crossfab, inverted” (see SEQ ID NOs 5, 23, 183, 187)) to human CD3, expressed by Jurkat cells (A), or to human MCSP, expressed by WM266-4 tumor cells (B) as determined by FACS.

[0082] FIG. 57. Binding of the “1+1 IgG Crossfab light chain fusion” (see SEQ ID NOs 183, 209, 211, 213) to human CD3, expressed by Jurkat cells (A), or to human CEA, expressed by LS-174T cells (B) as determined by FACS.

[0083] FIG. 58. Binding of the “2+1 IgG Crossfab” (see SEQ ID NOs 5, 23, 215, 217) and the “2+1 IgG Crossfab, inverted” (see SEQ ID NOs 5, 23, 215, 219) constructs to human CD3, expressed by Jurkat cells (A), or human MCSP, expressed by WM266-4 tumor cells (B) as determined by FACS.

[0084] FIG. 59. Surface expression level of the early activation marker CD69 (A) or the late activation marker CD25 (B) on human CD4⁺ or CD8⁺ T cells after 24 hours incubation with the indicated concentrations of the CD3/MCSP “1+1 CrossMab” (see SEQ ID NOs 5, 23, 183, 185), “1+1 IgG Crossfab” (see SEQ ID NOs 5, 29, 33, 181) and “2+1 IgG Crossfab” (see SEQ ID NOs 3, 5, 29, 33) constructs. The assay was performed in the presence or absence of MV-3 target cells, as indicated.

[0085] FIG. 60. Surface expression level of the early activation marker CD25 on CD4⁺ or CD8⁺ T cells from two different cynomolgus monkeys (A and B) in the presence or absence of huMCSP-positive MV-3 tumor cells upon co-culture with cynomolgus PBMCs (E:T ratio=3:1, normalized to CD3⁺ numbers), treated with the “2+1 IgG Crossfab” (see SEQ ID NOs 5, 23, 215, 217) and the “2+1 IgG Crossfab, inverted” (see SEQ ID NOs 5, 23, 215, 219) for ˜41 hours.

[0086] FIG. 61. Killing (as measured by LDH release) of MKN-45 (A) or LS-174T (B) tumor cells upon co-culture with human PBMCs (E:T ratio=10:1) and activation for 28 hours by different concentrations of the “2+1 IgG Crossfab, inverted (VL/VH)” (see SEQ ID NOs 33, 63, 65, 67) versus the “2+1 IgG Crossfab, inverted (CL/CH1)” (see SEQ ID NOs 65, 67, 183, 197) construct.

[0087] FIG. 62. Killing (as measured by LDH release) of WM266-4 tumor cells upon co-culture with human PBMCs (E:T ratio=10:1) and activation for 26 hours by different concentrations of the “2+1 IgG Crossfab (VL/VH)” (see SEQ ID NOs 33, 189, 191, 193) versus the “2+1 IgG Crossfab (CL/CH1)” (see SEQ ID NOs 183, 189, 193, 195) construct.

[0088] FIG. 63. Killing (as measured by LDH release) of MV-3 tumor cells upon co-culture with human PBMCs (E:T ratio=10:1) and activation for 27 hours by different concentrations of the “2+1 IgG Crossfab (VH/VL)” (see SEQ ID NOs 33, 189, 191, 193) versus the “2+1 IgG Crossfab (CL/CH1)” (see SEQ ID NOs 183, 189, 193, 195) constructs.

[0089] FIG. 64. Killing (as measured by LDH release) of human MCSP-positive WM266-4 (A) or MV-3 (B) tumor cells upon co-culture with human PBMCs (E:T ratio=10:1) and activation for 21 hours by different concentrations of the “2+1 IgG Crossfab” (see SEQ ID NOs 3, 5, 29, 33), the “1+1 CrossMab” (see SEQ ID NOs 5, 23, 183, 185), and the “1+1 IgG Crossfab” (see SEQ ID NOs 5, 29, 33, 181), as indicated.

[0090] FIG. 65. Killing (as measured by LDH release) of MKN-45 (A) or LS-174T (B) tumor cells upon co-culture with human PBMCs (E:T ratio=10:1) and activation for 28 hours by different concentrations of the “1+1 IgG Crossfab LC fusion” (see SEQ ID NOs 183, 209, 211, 213).

[0091] FIG. 66. Killing (as measured by LDH release) of MC38-huCEA tumor cells upon co-culture with human PBMCs (E:T ratio=10:1) and activation for 24 hours by different concentrations of the “1+1 IgG Crossfab LC fusion” (see SEQ ID NOs 183, 209, 211, 213) versus an untargeted “2+1 IgG Crossfab” reference.

[0092] FIG. 67. Killing (as measured by LDH release) of human MCSP-positive MV-3 (A) or WM266-4 (B) tumor cells upon co-culture with human PBMCs (E:T ratio=10:1), treated with the “2+1 IgG Crossfab (V9)” (see SEQ ID NOs 3, 5, 29, 33) and the “2+1 IgG Crossfab, inverted (V9)” (see SEQ ID NOs 5, 23, 183, 187), the “2+1 IgG Crossfab (anti-CD3)” (see SEQ ID NOs 5, 23, 215, 217) and the “2+1 IgG Crossfab, inverted (anti-CD3)” (see SEQ ID NOs 5, 23, 215, 219) constructs.

[0093] FIG. 68. Alignment of affinity matured anti-MCSP clones compared to the non-matured parental clone (M4-3 ML2).

[0094] FIG. 69. Schematic drawing of the MCSP TCB (2+1 Crossfab-IgG P329G LALA inverted) molecule.

[0095] FIG. 70. CE-SDS analyses of MCSP TCB (2+1 Crossfab-IgG P329G LALA inverted, SEQ ID NOs: 278, 319, 320 and 321). Electropherogram shown as SDS-PAGE of MCSP TCB: A) non reduced, B) reduced.

[0096] FIG. 71. Schematic drawing of CEA TCB (2+1 Crossfab-IgG P329G LALA inverted) molecule.

[0097] FIG. 72. CE-SDS analyses of CEA TCB (2+1 Crossfab-IgG P329G LALA inverted, SEQ ID NOs: 288, 322, 323 and 324) molecule. Electropherogram shown as SDS-Page of CEA TCB: A) non reduced, B) reduced.

[0098] FIG. 73. Binding of MCSP TCB (SEQ ID NOs: 278, 319, 320 and 321) to A375 cells (MCSP⁺) (A) and Jurkat (CD3⁺ cells) (B). “Untargeted TCB”: bispecific antibody engaging CD3 but no second antigen (SEQ ID NOs: 325, 326, 327 and 328).

[0099] FIG. 74. T-cell killing induced by MCSP TCB antibody (SEQ ID NOs: 278, 319, 320 and 321) of A375 (high MCSP) (A), MV-3 (medium MCSP) (B), HCT-116 (low MCSP) (C) and LS180 (MCSP negative) (D) target cells (E:T=10:1, effectors human PBMCs, incubation time 24 h). “Untargeted TCB”: bispecific antibody engaging CD3 but no second antigen (SEQ ID NOs: 325, 326, 327 and 328).

[0100] FIG. 75. Upregulation of CD25 and CD69 on human CD8⁺ (A, B) and CD4⁺ (C, D) T cells after T cell-mediated killing of MV3 melanoma cells (E:T=10:1, 24 h incubation) induced by MCSP TCB antibody (SEQ ID NOs: 278, 319, 320 and 321). “Untargeted TCB”: bispecific antibody engaging CD3 but no second antigen (SEQ ID NOs: 325, 326, 327 and 328).

[0101] FIG. 76. Secretion of IL-2 (A), IFN-γ (B), TNFα (C), IL-4 (D), IL-10 (E) and Granzyme B (F) by human PBMCs after T cell mediated killing of MV3 melanoma cells (E:T=10:1, 24 h incubation) induced by MCSP TCB antibody (SEQ ID NOs: 278, 319, 320 and 321). “Untargeted TCB”: bispecific antibody engaging CD3 but no second antigen (SEQ ID NOs: 325, 326, 327 and 328).

[0102] FIG. 77. Binding of CEA TCB (SEQ ID NOs: 288, 322, 323 and 324) to CEA-expressing A549 lung adenocarcinoma cells (A) and CD3-expressing immortalized human and cynomolgus T lymphocyte lines (Jurkat (B) and HSC-F (C), respectively).

[0103] FIG. 78. T-cell killing induced by CEA TCB (SEQ ID NOs: 288, 322, 323 and 324) of HPAFII (high CEA) (A, E), BxPC-3 (medium CEA) (B, F), ASPC-1 (low CEA) (C, G) and HCT-116 cells (CEA negative) (D, H). E:T=10:1, effectors human PBMCs, incubation time 24 h (A-D) or 48 h (E-H). “Untargeted TCB”: bispecific antibody engaging CD3 but no second antigen (SEQ ID NOs: 325, 326, 327 and 328).

[0104] FIG. 79. Human CD8⁺ and CD4⁺ T cell proliferation (A-D) and upregulation of CD25 on human CD8⁺ and CD4 T cells (E-H) 5 days after T cell-mediated killing of HPAFII (high CEA) (A, E), BxPC-3 (medium CEA) (B, F), ASPC-1 (low CEA) (C, G) and HCT-116 cells (CEA negative) (D, H) induced by CEA TCB (SEQ ID NOs: 288, 322, 323 and 324). “DP47 TCB”: bispecific antibody engaging CD3 but no second antigen (SEQ ID NOs: 325, 326, 327 and 328).

[0105] FIG. 80. Secretion of IFN-γ (A), TNFα (B), Granzyme B (C), IL-2 (D), IL-6 (E) and IL-10 (F) after T cell mediated killing of MKN45 tumor cells (E:T=10:1, 48 h incubation) induced by CEA TCB (SEQ ID NOs: 288, 322, 323 and 324). “Untargeted TCB”: bispecific antibody engaging CD3 but no second antigen (SEQ ID NOs: 325, 326, 327 and 328).

[0106] FIG. 81. T cell-mediated killing of CEA-expressing LS180 tumor target cells induced by CEA TCB (SEQ ID NOs: 288, 322, 323 and 324) in presence of increasing concentrations of shed CEA (sCEA), detected 24 h (A) or 48 h (B) after incubation with the CEA TCB and sCEA.

[0107] FIG. 82. T cell-mediated killing of A549 (lung adenocarcinoma) cells overexpressing human CEA (A549-hCEA), assessed 21 h (A, B) and 40 h (C, D) after incubation with CEA TCB (SEQ ID NOs: 288, 322, 323 and 324) and human PBMCs (A, C) or cynomolgus PBMCs (B, D) as effector cells.

[0108] FIG. 83. T cell-mediated killing of CEA-expressing human colorectal cancer cell lines induced by CEA TCB (SEQ ID NOs: 288, 322, 323 and 324) at 0.8 nM (A), 4 nM (B) and 20 nM (C). (D) correlation between CEA expression and % specific lysis at 20 nM of CEA TCB, (E) correlation between CEA expression and EC₅₀ of CEA TCB.

[0109] FIG. 84. In vivo anti-tumor efficacy of CEA TCB (SEQ ID NOs: 288, 322, 323 and 324) in a LS174T-fluc2 human colon carcinoma co-grafted with human PBMC (E:T ratio 5:1). Results show average and SEM from 12 mice of tumor volume measured by caliper (A and C) and by bioluminescence (Total Flux, B and D) in the different study groups. (A, B) early treatment starting at day 1, (C, D) delayed treatment starting at day 7. The MCSP TCB (SEQ ID NOs: 278, 319, 320 and 321) was used as negative control.

[0110] FIG. 85. In vivo anti-tumor efficacy of CEA TCB (SEQ ID NOs: 288, 322, 323 and 324) in a LS174T-fluc2 human colon carcinoma co-grafted with human PBMC (E:T ratio 1:1). Results show average and SEM from 10 mice of tumor volume measured by caliper (A) and by bioluminescence (Total Flux, B) in the different study groups. The MCSP TCB (SEQ ID NOs: 278, 319, 320 and 321) was used as negative control.

[0111] FIG. 86. In vivo efficacy of murinized CEA TCB in a Panco2-huCEA orthotopic tumor model in immunocompetent huCD3ε/huCEA transgenic mice.

[0112] FIG. 87. Thermal stability of CEA TCB. Dynamic Light Scattering measured in a temperature ramp from 25-75° C. at 0.05° C./min. Duplicate is shown in grey.

[0113] FIG. 88. Thermal stability of MCSP TCB. Dynamic Light Scattering measured in a temperature ramp from 25-75° C. at 0.05° C./min. Duplicate is shown as grey line.

[0114] FIG. 89. T cell-mediated killing induced by MCSP TCB (SEQ ID NOs: 278, 319, 320 and 321) and MCSP 1+1 CrossMab TCB antibodies of (A) A375 (high MCSP), (B) MV-3 (medium MCSP) and (C) HCT-116 (low MCSP) tumor target cells. (D) LS180 (MCSP negative tumor cell line) was used as negative control. Tumor cell killing was assessed 24 h (A-D) and 48 h (E-H) post incubation of target cells with the antibodies and effector cells (human PBMCs).

[0115] FIG. 90. CD25 and CD69 upregulation on CD8⁺ and CD4⁺ T cells after T-cell killing of MCSP-expressing tumor cells (A375, A-D and MV-3, E-H) mediated by the MCSP TCB (SEQ ID NOs: 278, 319, 320 and 321) and MCSP 1+1 CrossMab TCB antibodies.

[0116] FIG. 91. CE-SDS analyses of DP47 GS TCB (2+1 Crossfab-IgG P329G LALA inverted=“Untargeted TCB” SEQ ID NOs: 325, 326, 327 and 328) containing DP47 GS as non binding antibody and humanized CH2527 as anti CD3 antibody. Electropherogram shown as SDS-PAGE of DP47 GS TCB: A) non reduced, B) reduced.

[0117] FIG. 92. Schematic drawing of the MCSP TCB hIgG4 S228P/L325E molecule.

[0118] FIG. 93. CE-SDS analyses of the MCSP TCB hIgG4 S228P/L325E molecule (SEQ ID NOs: 278, 319, 369 and 370). Electropherogram shown as SDS-PAGE of MCSP TCB hIgG4 S228P/L325E: (A) non reduced, (B) reduced.

[0119] FIG. 94. Binding of MCSP TCB hIgG4 S228P/L325E (SEQ ID NOs: 278, 319, 369 and 370) to MV-3 cells (MCSP+; EC50=2029 pM) (A) and Jurkat (CD3+) (B).

[0120] FIG. 95. T-cell killing induced by MCSP TCB hIgG4 S228P/L325E (SEQ ID NOs: 278, 319, 369 and 370) of MV-3 target cells with an incubation time of 24 h (EC50=14.9 pM) (A) and 48 h (EC50=0.24 pM) (B) (E:T=10:1, effectors human PBMCs).

### DETAILED DESCRIPTION OF THE INVENTION

### Definitions

[0121] Terms are used herein as generally used in the art, unless otherwise defined in the following. As used herein, the term “antigen binding molecule” refers in its broadest sense to a molecule that specifically binds an antigenic determinant. Examples of antigen binding molecules are immunoglobulins and derivatives, e.g. fragments, thereof.

[0122] The term “bispecific” means that the antigen binding molecule is able to specifically bind to at least two distinct antigenic determinants. Typically, a bispecific antigen binding molecule comprises two antigen binding sites, each of which is specific for a different antigenic determinant. In certain embodiments the bispecific antigen binding molecule is capable of simultaneously binding two antigenic determinants, particularly two antigenic determinants expressed on two distinct cells.

[0123] The term “valent” as used herein denotes the presence of a specified number of antigen binding sites in an antigen binding molecule. As such, the term “monovalent binding to an antigen” denotes the presence of one (and not more than one) antigen binding site specific for the antigen in the antigen binding molecule.

[0124] An “antigen binding site” refers to the site, i.e. one or more amino acid residues, of an antigen binding molecule which provides interaction with the antigen. For example, the antigen binding site of an antibody comprises amino acid residues from the complementarity determining regions (CDRs). A native immunoglobulin molecule typically has two antigen binding sites, a Fab molecule typically has a single antigen binding site.

[0125] As used herein, the term “antigen binding moiety” refers to a polypeptide molecule that specifically binds to an antigenic determinant. In one embodiment, an antigen binding moiety is able to direct the entity to which it is attached (e.g. a second antigen binding moiety) to a target site, for example to a specific type of tumor cell or tumor stroma bearing the antigenic determinant. In another embodiment an antigen binding moiety is able to activate signaling through its target antigen, for example a T cell receptor complex antigen. Antigen binding moieties include antibodies and fragments thereof as further defined herein. Particular antigen binding moieties include an antigen binding domain of an antibody, comprising an antibody heavy chain variable region and an antibody light chain variable region. In certain embodiments, the antigen binding moieties may comprise antibody constant regions as further defined herein and known in the art. Useful heavy chain constant regions include any of the five isotypes: α, δ, ε, γ, or μ. Useful light chain constant regions include any of the two isotypes: κ and λ.

[0126] As used herein, the term “antigenic determinant” is synonymous with “antigen” and “epitope,” and refers to a site (e.g. a contiguous stretch of amino acids or a conformational configuration made up of different regions of non-contiguous amino acids) on a polypeptide macromolecule to which an antigen binding moiety binds, forming an antigen binding moiety-antigen complex. Useful antigenic determinants can be found, for example, on the surfaces of tumor cells, on the surfaces of virus-infected cells, on the surfaces of other diseased cells, on the surface of immune cells, free in blood serum, and/or in the extracellular matrix (ECM). The proteins referred to as antigens herein (e.g. MCSP, FAP, CEA, EGFR, CD33, CD3) can be any native form the proteins from any vertebrate source, including mammals such as primates (e.g. humans) and rodents (e.g. mice and rats), unless otherwise indicated. In a particular embodiment the antigen is a human protein. Where reference is made to a specific protein herein, the term encompasses the “full-length”, unprocessed protein as well as any form of the protein that results from processing in the cell. The term also encompasses naturally occurring variants of the protein, e.g. splice variants or allelic variants. Exemplary human proteins useful as antigens include, but are not limited to: Melanoma-associated Chondroitin Sulfate Proteoglycan (MCSP), also known as Chondroitin Sulfate Proteoglycan 4 (CSPG4; UniProt no. Q6UVK1 (version 70), NCBI RefSeq no. NP_{—}001888.2); Fibroblast Activation Protein (FAP), also known as Seprase (Uni Prot nos. Q12884, Q86Z29, Q99998, NCBI Accession no. NP_{—}004451); Carcinoembroynic antigen (CEA), also known as Carcinoembryonic antigen-related cell adhesion molecule 5 (CEACAM5; UniProt no. P06731 (version 119), NCBI RefSeq no. NP_{—}004354.2); CD33, also known as gp67 or Siglec-3 (UniProt no. P20138, NCBI Accession nos. NP_{—}001076087, NP_{—}001171079); Epidermal Growth Factor Receptor (EGFR), also known as ErbB-1 or Her1 (UniProt no. P0053, NCBI Accession nos. NP_{—}958439, NP_{—}958440), and CD3, particularly the epsilon subunit of CD3 (see UniProt no. P07766 (version 130), NCBI RefSeq no. NP_{—}000724.1, SEQ ID NO: 265 for the human sequence; or UniProt no. Q95LI5 (version 49), NCBI GenBank no. BAB71849.1, SEQ ID NO: 266 for the cynomolgus [Macaca fascicularis] sequence). In certain embodiments the T cell activating bispecific antigen binding molecule of the invention binds to an epitope of an activating T cell antigen or a target cell antigen that is conserved among the activating T cell antigen or target antigen from different species.

[0127] In certain embodiments, the T cell activating bispecific antigen binding molecule of the invention binds to CD3 and CEA (CEACAM5), but does not bind to CEACAM1 or CEACAM6. By “specific binding” is meant that the binding is selective for the antigen and can be discriminated from unwanted or non-specific interactions. The ability of an antigen binding moiety to bind to a specific antigenic determinant can be measured either through an enzyme-linked immunosorbent assay (ELISA) or other techniques familiar to one of skill in the art, e.g. surface plasmon resonance (SPR) technique (analyzed on a BIAcore instrument) (Liljeblad et al., Glyco J 17, 323-329 (2000)), and traditional binding assays (Heeley, Endocr Res 28, 217-229 (2002)). In one embodiment, the extent of binding of an antigen binding moiety to an unrelated protein is less than about 10% of the binding of the antigen binding moiety to the antigen as measured, e.g., by SPR. In certain embodiments, an antigen binding moiety that binds to the antigen, or an antigen binding molecule comprising that antigen binding moiety, has a dissociation constant (K_{D}) of ≦1 μM, ≦100 nM, ≦10 nM, ≦1 nM, ≦0.1 nM, ≦0.01 nM, or ≦0.001 nM (e.g. 10⁻⁸M or less, e.g. from 10⁻⁸M to 10⁻¹³M, e.g., from 10⁻⁹M to 10⁻¹³ M).

[0128] “Affinity” refers to the strength of the sum total of non-covalent interactions between a single binding site of a molecule (e.g., a receptor) and its binding partner (e.g., a ligand). Unless indicated otherwise, as used herein, “binding affinity” refers to intrinsic binding affinity which reflects a 1:1 interaction between members of a binding pair (e.g., an antigen binding moiety and an antigen, or a receptor and its ligand). The affinity of a molecule X for its partner Y can generally be represented by the dissociation constant (K_{D}), which is the ratio of dissociation and association rate constants (k_{off} and kₒₙ, respectively). Thus, equivalent affinities may comprise different rate constants, as long as the ratio of the rate constants remains the same. Affinity can be measured by well established methods known in the art, including those described herein. A particular method for measuring affinity is Surface Plasmon Resonance (SPR).

[0129] “Reduced binding”, for example reduced binding to an Fc receptor, refers to a decrease in affinity for the respective interaction, as measured for example by SPR. For clarity the term includes also reduction of the affinity to zero (or below the detection limit of the analytic method), i.e. complete abolishment of the interaction. Conversely, “increased binding” refers to an increase in binding affinity for the respective interaction.

[0130] An “activating T cell antigen” as used herein refers to an antigenic determinant expressed on the surface of a T lymphocyte, particularly a cytotoxic T lymphocyte, which is capable of inducing T cell activation upon interaction with an antigen binding molecule. Specifically, interaction of an antigen binding molecule with an activating T cell antigen may induce T cell activation by triggering the signaling cascade of the T cell receptor complex. In a particular embodiment the activating T cell antigen is CD3.

[0131] “T cell activation” as used herein refers to one or more cellular response of a T lymphocyte, particularly a cytotoxic T lymphocyte, selected from: proliferation, differentiation, cytokine secretion, cytotoxic effector molecule release, cytotoxic activity, and expression of activation markers. The T cell activating bispecific antigen binding molecules of the invention are capable of inducing T cell activation. Suitable assays to measure T cell activation are known in the art described herein.

[0132] A “target cell antigen” as used herein refers to an antigenic determinant presented on the surface of a target cell, for example a cell in a tumor such as a cancer cell or a cell of the tumor stroma.

[0133] As used herein, the terms “first” and “second” with respect to antigen binding moieties etc., are used for convenience of distinguishing when there is more than one of each type of moiety. Use of these terms is not intended to confer a specific order or orientation of the T cell activating bispecific antigen binding molecule unless explicitly so stated.

[0134] A “Fab molecule” refers to a protein consisting of the VH and CH1 domain of the heavy chain (the “Fab heavy chain”) and the VL and CL domain of the light chain (the “Fab light chain”) of an immunoglobulin.

[0135] By “fused” is meant that the components (e.g. a Fab molecule and an Fc domain subunit) are linked by peptide bonds, either directly or via one or more peptide linkers.

[0136] As used herein, the term “single-chain” refers to a molecule comprising amino acid monomers linearly linked by peptide bonds. In certain embodiments, one of the antigen binding moieties is a single-chain Fab molecule, i.e. a Fab molecule wherein the Fab light chain and the Fab heavy chain are connected by a peptide linker to form a single peptide chain. In a particular such embodiment, the C-terminus of the Fab light chain is connected to the N-terminus of the Fab heavy chain in the single-chain Fab molecule.

[0137] By a “crossover” Fab molecule (also termed “Crossfab”) is meant a Fab molecule wherein either the variable regions or the constant regions of the Fab heavy and light chain are exchanged, i.e. the crossover Fab molecule comprises a peptide chain composed of the light chain variable region and the heavy chain constant region, and a peptide chain composed of the heavy chain variable region and the light chain constant region. For clarity, in a crossover Fab molecule wherein the variable regions of the Fab light chain and the Fab heavy chain are exchanged, the peptide chain comprising the heavy chain constant region is referred to herein as the “heavy chain” of the crossover Fab molecule. Conversely, in a crossover Fab molecule wherein the constant regions of the Fab light chain and the Fab heavy chain are exchanged, the peptide chain comprising the heavy chain variable region is referred to herein as the “heavy chain” of the crossover Fab molecule.

[0138] The term “immunoglobulin molecule” refers to a protein having the structure of a naturally occurring antibody. For example, immunoglobulins of the IgG class are heterotetrameric glycoproteins of about 150,000 daltons, composed of two light chains and two heavy chains that are disulfide-bonded. From N- to C-terminus, each heavy chain has a variable region (VH), also called a variable heavy domain or a heavy chain variable domain, followed by three constant domains (CH1, CH2, and CH3), also called a heavy chain constant region. Similarly, from N- to C-terminus, each light chain has a variable region (VL), also called a variable light domain or a light chain variable domain, followed by a constant light (CL) domain, also called a light chain constant region. The heavy chain of an immunoglobulin may be assigned to one of five types, called α (IgA), δ (IgD), ε (IgE), γ (IgG), or μ (IgM), some of which may be further divided into subtypes, e.g. γ₁ (IgG₁), γ₂ (IgG₂), γ₃ (IgG₃), γ₄ (IgG₄), α₁ (IgA₁) and α₂ (IgA₂). The light chain of an immunoglobulin may be assigned to one of two types, called kappa (κ) and lambda (λ), based on the amino acid sequence of its constant domain. An immunoglobulin essentially consists of two Fab molecules and an Fc domain, linked via the immunoglobulin hinge region.

[0139] The term “antibody” herein is used in the broadest sense and encompasses various antibody structures, including but not limited to monoclonal antibodies, polyclonal antibodies, and antibody fragments so long as they exhibit the desired antigen-binding activity.

[0140] An “antibody fragment” refers to a molecule other than an intact antibody that comprises a portion of an intact antibody that binds the antigen to which the intact antibody binds. Examples of antibody fragments include but are not limited to Fv, Fab, Fab′, Fab′-SH, F(ab′)₂, diabodies, linear antibodies, single-chain antibody molecules (e.g. scFv), and single-domain antibodies. For a review of certain antibody fragments, see Hudson et al., Nat Med 9, 129-134 (2003). For a review of scFv fragments, see e.g. Plückthun, in The Pharmacology of Monoclonal Antibodies, vol. 113, Rosenburg and Moore eds., Springer-Verlag, New York, pp. 269-315 (1994); see also WO 93/16185; and U.S. Pat. Nos. 5,571,894 and 5,587,458. For discussion of Fab and F(ab′)₂ fragments comprising salvage receptor binding epitope residues and having increased in vivo half-life, see U.S. Pat. No. 5,869,046. Diabodies are antibody fragments with two antigen-binding sites that may be bivalent or bispecific. See, for example, EP 404,097; WO 1993/01161; Hudson et al., Nat Med 9, 129-134 (2003); and Hollinger et al., Proc Natl Acad Sci USA 90, 6444-6448 (1993). Triabodies and tetrabodies are also described in Hudson et al., Nat Med 9, 129-134 (2003). Single-domain antibodies are antibody fragments comprising all or a portion of the heavy chain variable domain or all or a portion of the light chain variable domain of an antibody. In certain embodiments, a single-domain antibody is a human single-domain antibody (Domantis, Inc., Waltham, Mass.; see e.g. U.S. Pat. No. 6,248,516 B1). Antibody fragments can be made by various techniques, including but not limited to proteolytic digestion of an intact antibody as well as production by recombinant host cells (e.g. E. coli or phage), as described herein.

[0141] The term “antigen binding domain” refers to the part of an antibody that comprises the area which specifically binds to and is complementary to part or all of an antigen. An antigen binding domain may be provided by, for example, one or more antibody variable domains (also called antibody variable regions). Particularly, an antigen binding domain comprises an antibody light chain variable region (VL) and an antibody heavy chain variable region (VH).

[0142] The term “variable region” or “variable domain” refers to the domain of an antibody heavy or light chain that is involved in binding the antibody to antigen. The variable domains of the heavy chain and light chain (VH and VL, respectively) of a native antibody generally have similar structures, with each domain comprising four conserved framework regions (FRs) and three hypervariable regions (HVRs). See, e.g., Kindt et al., Kuby Immunology, 6^{th} ed., W.H. Freeman and Co., page 91 (2007). A single VH or VL domain may be sufficient to confer antigen-binding specificity.

[0143] The term “hypervariable region” or “HVR”, as used herein, refers to each of the regions of an antibody variable domain which are hypervariable in sequence and/or form structurally defined loops (“hypervariable loops”). Generally, native four-chain antibodies comprise six HVRs; three in the VH (H1, H2, H3), and three in the VL (L1, L2, L3). HVRs generally comprise amino acid residues from the hypervariable loops and/or from the complementarity determining regions (CDRs), the latter being of highest sequence variability and/or involved in antigen recognition. With the exception of CDR1 in VH, CDRs generally comprise the amino acid residues that form the hypervariable loops. Hypervariable regions (HVRs) are also referred to as “complementarity determining regions” (CDRs), and these terms are used herein interchangeably in reference to portions of the variable region that form the antigen binding regions. This particular region has been described by Kabat et al., U.S. Dept. of Health and Human Services, Sequences of Proteins of Immunological Interest (1983) and by Chothia et al., J Mol Biol 196:901-917 (1987), where the definitions include overlapping or subsets of amino acid residues when compared against each other. Nevertheless, application of either definition to refer to a CDR of an antibody or variants thereof is intended to be within the scope of the term as defined and used herein. The appropriate amino acid residues which encompass the CDRs as defined by each of the above cited references are set forth below in Table 1 as a comparison. The exact residue numbers which encompass a particular CDR will vary depending on the sequence and size of the CDR. Those skilled in the art can routinely determine which residues comprise a particular CDR given the variable region amino acid sequence of the antibody.

TABLE 1
CDR Definitions¹

| CDR | Kabat | Chothia | AbM² |
|---|---|---|---|
| V_{H} CDR1 | 31-35 | 26-32 | 26-35 |
| V_{H} CDR2 | 50-65 | 52-58 | 50-58 |
| V_{H} CDR3 | 95-102 | 95-102 | 95-102 |
| V_{L} CDR1 | 24-34 | 26-32 | 24-34 |
| V_{L} CDR2 | 50-56 | 50-52 | 50-56 |
| V_{L} CDR3 | 89-97 | 91-96 | 89-97 |

¹Numbering of all CDR definitions in Table 1 is according to the numbering conventions set forth by Kabat et al. (see below).
²“AbM” with a lowercase “b” as used in Table 1 refers to the CDRs as defined by Oxford Molecular's “AbM” antibody modeling software.

[0144] Kabat et al. also defined a numbering system for variable region sequences that is applicable to any antibody. One of ordinary skill in the art can unambiguously assign this system of “Kabat numbering” to any variable region sequence, without reliance on any experimental data beyond the sequence itself. As used herein, “Kabat numbering” refers to the numbering system set forth by Kabat et al., U.S. Dept. of Health and Human Services, “Sequence of Proteins of Immunological Interest” (1983). Unless otherwise specified, references to the numbering of specific amino acid residue positions in an antibody variable region are according to the Kabat numbering system.

[0145] The polypeptide sequences of the sequence listing are not numbered according to the Kabat numbering system. However, it is well within the ordinary skill of one in the art to convert the numbering of the sequences of the Sequence Listing to Kabat numbering.

[0146] “Framework” or “FR” refers to variable domain residues other than hypervariable region (HVR) residues. The FR of a variable domain generally consists of four FR domains: FR1, FR2, FR3, and FR4. Accordingly, the HVR and FR sequences generally appear in the following sequence in VH (or VL): FR1-H1(L1)-FR2-H2(L2)-FR3-H3 (L3)-FR4.

[0147] The “class” of an antibody or immunoglobulin refers to the type of constant domain or constant region possessed by its heavy chain. There are five major classes of antibodies: IgA, IgD, IgE, IgG, and IgM, and several of these may be further divided into subclasses (isotypes), e.g., IgG₁, IgG₂, IgG₃, IgG₄, IgA₁, and IgA₂. The heavy chain constant domains that correspond to the different classes of immunoglobulins are called α, δ, ε, γ, and μ, respectively.

[0148] The term “Fc domain” or “Fc region” herein is used to define a C-terminal region of an immunoglobulin heavy chain that contains at least a portion of the constant region. The term includes native sequence Fc regions and variant Fc regions. Although the boundaries of the Fc region of an IgG heavy chain might vary slightly, the human IgG heavy chain Fc region is usually defined to extend from Cys226, or from Pro230, to the carboxyl-terminus of the heavy chain. However, the C-terminal lysine (Lys447) of the Fc region may or may not be present. Unless otherwise specified herein, numbering of amino acid residues in the Fc region or constant region is according to the EU numbering system, also called the EU index, as described in Kabat et al., Sequences of Proteins of Immunological Interest, 5th Ed. Public Health Service, National Institutes of Health, Bethesda, Md., 1991. A “subunit” of an Fc domain as used herein refers to one of the two polypeptides forming the dimeric Fc domain, i.e. a polypeptide comprising C-terminal constant regions of an immunoglobulin heavy chain, capable of stable self-association. For example, a subunit of an IgG Fc domain comprises an IgG CH2 and an IgG CH3 constant domain.

[0149] A “modification promoting the association of the first and the second subunit of the Fc domain” is a manipulation of the peptide backbone or the post-translational modifications of an Fc domain subunit that reduces or prevents the association of a polypeptide comprising the Fc domain subunit with an identical polypeptide to form a homodimer. A modification promoting association as used herein particularly includes separate modifications made to each of the two Fc domain subunits desired to associate (i.e. the first and the second subunit of the Fc domain), wherein the modifications are complementary to each other so as to promote association of the two Fc domain subunits. For example, a modification promoting association may alter the structure or charge of one or both of the Fc domain subunits so as to make their association sterically or electrostatically favorable, respectively. Thus, (hetero)dimerization occurs between a polypeptide comprising the first Fc domain subunit and a polypeptide comprising the second Fc domain subunit, which might be non-identical in the sense that further components fused to each of the subunits (e.g. antigen binding moieties) are not the same. In some embodiments the modification promoting association comprises an amino acid mutation in the Fc domain, specifically an amino acid substitution. In a particular embodiment, the modification promoting association comprises a separate amino acid mutation, specifically an amino acid substitution, in each of the two subunits of the Fc domain.

[0150] The term “effector functions” refers to those biological activities attributable to the Fc region of an antibody, which vary with the antibody isotype. Examples of antibody effector functions include: C1q binding and complement dependent cytotoxicity (CDC), Fc receptor binding, antibody-dependent cell-mediated cytotoxicity (ADCC), antibody-dependent cellular phagocytosis (ADCP), cytokine secretion, immune complex-mediated antigen uptake by antigen presenting cells, down regulation of cell surface receptors (e.g. B cell receptor), and B cell activation.

[0151] As used herein, the terms “engineer, engineered, engineering”, are considered to include any manipulation of the peptide backbone or the post-translational modifications of a naturally occurring or recombinant polypeptide or fragment thereof. Engineering includes modifications of the amino acid sequence, of the glycosylation pattern, or of the side chain group of individual amino acids, as well as combinations of these approaches.

[0152] The term “amino acid mutation” as used herein is meant to encompass amino acid substitutions, deletions, insertions, and modifications. Any combination of substitution, deletion, insertion, and modification can be made to arrive at the final construct, provided that the final construct possesses the desired characteristics, e.g., reduced binding to an Fc receptor, or increased association with another peptide. Amino acid sequence deletions and insertions include amino- and/or carboxy-terminal deletions and insertions of amino acids. Particular amino acid mutations are amino acid substitutions. For the purpose of altering e.g. the binding characteristics of an Fc region, non-conservative amino acid substitutions, i.e. replacing one amino acid with another amino acid having different structural and/or chemical properties, are particularly preferred. Amino acid substitutions include replacement by non-naturally occurring amino acids or by naturally occurring amino acid derivatives of the twenty standard amino acids (e.g. 4-hydroxyproline, 3-methylhistidine, ornithine, homoserine, 5-hydroxylysine). Amino acid mutations can be generated using genetic or chemical methods well known in the art. Genetic methods may include site-directed mutagenesis, PCR, gene synthesis and the like. It is contemplated that methods of altering the side chain group of an amino acid by methods other than genetic engineering, such as chemical modification, may also be useful. Various designations may be used herein to indicate the same amino acid mutation. For example, a substitution from proline at position 329 of the Fc domain to glycine can be indicated as 329G, G329, G₃₂₉, P329G, or Pro329Gly.

[0153] As used herein, term “polypeptide” refers to a molecule composed of monomers (amino acids) linearly linked by amide bonds (also known as peptide bonds). The term “polypeptide” refers to any chain of two or more amino acids, and does not refer to a specific length of the product. Thus, peptides, dipeptides, tripeptides, oligopeptides, “protein,” “amino acid chain,” or any other term used to refer to a chain of two or more amino acids, are included within the definition of “polypeptide,” and the term “polypeptide” may be used instead of, or interchangeably with any of these terms. The term “polypeptide” is also intended to refer to the products of post-expression modifications of the polypeptide, including without limitation glycosylation, acetylation, phosphorylation, amidation, derivatization by known protecting/blocking groups, proteolytic cleavage, or modification by non-naturally occurring amino acids. A polypeptide may be derived from a natural biological source or produced by recombinant technology, but is not necessarily translated from a designated nucleic acid sequence. It may be generated in any manner, including by chemical synthesis. A polypeptide of the invention may be of a size of about 3 or more, 5 or more, 10 or more, 20 or more, 25 or more, 50 or more, 75 or more, 100 or more, 200 or more, 500 or more, 1,000 or more, or 2,000 or more amino acids. Polypeptides may have a defined three-dimensional structure, although they do not necessarily have such structure. Polypeptides with a defined three-dimensional structure are referred to as folded, and polypeptides which do not possess a defined three-dimensional structure, but rather can adopt a large number of different conformations, and are referred to as unfolded.

[0154] By an “isolated” polypeptide or a variant, or derivative thereof is intended a polypeptide that is not in its natural milieu. No particular level of purification is required. For example, an isolated polypeptide can be removed from its native or natural environment. Recombinantly produced polypeptides and proteins expressed in host cells are considered isolated for the purpose of the invention, as are native or recombinant polypeptides which have been separated, fractionated, or partially or substantially purified by any suitable technique.

[0155] Percent (%) amino acid sequence identity” with respect to a reference polypeptide sequence is defined as the percentage of amino acid residues in a candidate sequence that are identical with the amino acid residues in the reference polypeptide sequence, after aligning the sequences and introducing gaps, if necessary, to achieve the maximum percent sequence identity, and not considering any conservative substitutions as part of the sequence identity. Alignment for purposes of determining percent amino acid sequence identity can be achieved in various ways that are within the skill in the art, for instance, using publicly available computer software such as BLAST, BLAST-2, ALIGN or Megalign (DNASTAR) software. Those skilled in the art can determine appropriate parameters for aligning sequences, including any algorithms needed to achieve maximal alignment over the full length of the sequences being compared. For purposes herein, however, % amino acid sequence identity values are generated using the sequence comparison computer program ALIGN-2. The ALIGN-2 sequence comparison computer program was authored by Genentech, Inc., and the source code has been filed with user documentation in the U.S. Copyright Office, Washington D.C., 20559, where it is registered under U.S. Copyright Registration No. TXU510087. The ALIGN-2 program is publicly available from Genentech, Inc., South San Francisco, Calif., or may be compiled from the source code. The ALIGN-2 program should be compiled for use on a UNIX operating system, including digital UNIX V4.0D. All sequence comparison parameters are set by the ALIGN-2 program and do not vary. In situations where ALIGN-2 is employed for amino acid sequence comparisons, the % amino acid sequence identity of a given amino acid sequence A to, with, or against a given amino acid sequence B (which can alternatively be phrased as a given amino acid sequence A that has or comprises a certain % amino acid sequence identity to, with, or against a given amino acid sequence B) is calculated as follows:

100 times the fraction X/Y

where X is the number of amino acid residues scored as identical matches by the sequence alignment program ALIGN-2 in that program's alignment of A and B, and where Y is the total number of amino acid residues in B. It will be appreciated that where the length of amino acid sequence A is not equal to the length of amino acid sequence B, the % amino acid sequence identity of A to B will not equal the % amino acid sequence identity of B to A. Unless specifically stated otherwise, all % amino acid sequence identity values used herein are obtained as described in the immediately preceding paragraph using the ALIGN-2 computer program.

[0156] The term “polynucleotide” refers to an isolated nucleic acid molecule or construct, e.g. messenger RNA (mRNA), virally-derived RNA, or plasmid DNA (pDNA). A polynucleotide may comprise a conventional phosphodiester bond or a non-conventional bond (e.g. an amide bond, such as found in peptide nucleic acids (PNA). The term “nucleic acid molecule” refers to any one or more nucleic acid segments, e.g. DNA or RNA fragments, present in a polynucleotide.

[0157] By “isolated” nucleic acid molecule or polynucleotide is intended a nucleic acid molecule, DNA or RNA, which has been removed from its native environment. For example, a recombinant polynucleotide encoding a polypeptide contained in a vector is considered isolated for the purposes of the present invention. Further examples of an isolated polynucleotide include recombinant polynucleotides maintained in heterologous host cells or purified (partially or substantially) polynucleotides in solution. An isolated polynucleotide includes a polynucleotide molecule contained in cells that ordinarily contain the polynucleotide molecule, but the polynucleotide molecule is present extrachromosomally or at a chromosomal location that is different from its natural chromosomal location. Isolated RNA molecules include in vivo or in vitro RNA transcripts of the present invention, as well as positive and negative strand forms, and double-stranded forms. Isolated polynucleotides or nucleic acids according to the present invention further include such molecules produced synthetically. In addition, a polynucleotide or a nucleic acid may be or may include a regulatory element such as a promoter, ribosome binding site, or a transcription terminator.

[0158] By a nucleic acid or polynucleotide having a nucleotide sequence at least, for example, 95% “identical” to a reference nucleotide sequence of the present invention, it is intended that the nucleotide sequence of the polynucleotide is identical to the reference sequence except that the polynucleotide sequence may include up to five point mutations per each 100 nucleotides of the reference nucleotide sequence. In other words, to obtain a polynucleotide having a nucleotide sequence at least 95% identical to a reference nucleotide sequence, up to 5% of the nucleotides in the reference sequence may be deleted or substituted with another nucleotide, or a number of nucleotides up to 5% of the total nucleotides in the reference sequence may be inserted into the reference sequence. These alterations of the reference sequence may occur at the 5′ or 3′ terminal positions of the reference nucleotide sequence or anywhere between those terminal positions, interspersed either individually among residues in the reference sequence or in one or more contiguous groups within the reference sequence. As a practical matter, whether any particular polynucleotide sequence is at least 80%, 85%, 90%, 95%, 96%, 97%, 98% or 99% identical to a nucleotide sequence of the present invention can be determined conventionally using known computer programs, such as the ones discussed above for polypeptides (e.g. ALIGN-2).

[0159] The term “expression cassette” refers to a polynucleotide generated recombinantly or synthetically, with a series of specified nucleic acid elements that permit transcription of a particular nucleic acid in a target cell. The recombinant expression cassette can be incorporated into a plasmid, chromosome, mitochondrial DNA, plastid DNA, virus, or nucleic acid fragment. Typically, the recombinant expression cassette portion of an expression vector includes, among other sequences, a nucleic acid sequence to be transcribed and a promoter. In certain embodiments, the expression cassette of the invention comprises polynucleotide sequences that encode bispecific antigen binding molecules of the invention or fragments thereof.

[0160] The term “vector” or “expression vector” is synonymous with “expression construct” and refers to a DNA molecule that is used to introduce and direct the expression of a specific gene to which it is operably associated in a target cell. The term includes the vector as a self-replicating nucleic acid structure as well as the vector incorporated into the genome of a host cell into which it has been introduced. The expression vector of the present invention comprises an expression cassette. Expression vectors allow transcription of large amounts of stable mRNA. Once the expression vector is inside the target cell, the ribonucleic acid molecule or protein that is encoded by the gene is produced by the cellular transcription and/or translation machinery. In one embodiment, the expression vector of the invention comprises an expression cassette that comprises polynucleotide sequences that encode bispecific antigen binding molecules of the invention or fragments thereof.

[0161] The terms “host cell”, “host cell line,” and “host cell culture” are used interchangeably and refer to cells into which exogenous nucleic acid has been introduced, including the progeny of such cells. Host cells include “transformants” and “transformed cells,” which include the primary transformed cell and progeny derived therefrom without regard to the number of passages. Progeny may not be completely identical in nucleic acid content to a parent cell, but may contain mutations. Mutant progeny that have the same function or biological activity as screened or selected for in the originally transformed cell are included herein. A host cell is any type of cellular system that can be used to generate the bispecific antigen binding molecules of the present invention. Host cells include cultured cells, e.g. mammalian cultured cells, such as CHO cells, BHK cells, NS0 cells, SP2/0 cells, YO myeloma cells, P3X63 mouse myeloma cells, PER cells, PER.C6 cells or hybridoma cells, yeast cells, insect cells, and plant cells, to name only a few, but also cells comprised within a transgenic animal, transgenic plant or cultured plant or animal tissue.

[0162] An “activating Fc receptor” is an Fc receptor that following engagement by an Fc domain of an antibody elicits signaling events that stimulate the receptor-bearing cell to perform effector functions. Human activating Fc receptors include FcγRIIIa (CD16a), FcγRI (CD64), FcγRIIa (CD32), and FcαRI (CD89).

[0163] Antibody-dependent cell-mediated cytotoxicity (ADCC) is an immune mechanism leading to the lysis of antibody-coated target cells by immune effector cells. The target cells are cells to which antibodies or derivatives thereof comprising an Fc region specifically bind, generally via the protein part that is N-terminal to the Fc region. As used herein, the term “reduced ADCC” is defined as either a reduction in the number of target cells that are lysed in a given time, at a given concentration of antibody in the medium surrounding the target cells, by the mechanism of ADCC defined above, and/or an increase in the concentration of antibody in the medium surrounding the target cells, required to achieve the lysis of a given number of target cells in a given time, by the mechanism of ADCC. The reduction in ADCC is relative to the ADCC mediated by the same antibody produced by the same type of host cells, using the same standard production, purification, formulation and storage methods (which are known to those skilled in the art), but that has not been engineered. For example the reduction in ADCC mediated by an antibody comprising in its Fc domain an amino acid substitution that reduces ADCC, is relative to the ADCC mediated by the same antibody without this amino acid substitution in the Fc domain. Suitable assays to measure ADCC are well known in the art (see e.g. PCT publication no. WO 2006/082515 or PCT publication no. WO 2012/130831).

[0164] An “effective amount” of an agent refers to the amount that is necessary to result in a physiological change in the cell or tissue to which it is administered.

[0165] A “therapeutically effective amount” of an agent, e.g. a pharmaceutical composition, refers to an amount effective, at dosages and for periods of time necessary, to achieve the desired therapeutic or prophylactic result. A therapeutically effective amount of an agent for example eliminates, decreases, delays, minimizes or prevents adverse effects of a disease.

[0166] An “individual” or “subject” is a mammal. Mammals include, but are not limited to, domesticated animals (e.g. cows, sheep, cats, dogs, and horses), primates (e.g. humans and non-human primates such as monkeys), rabbits, and rodents (e.g. mice and rats). Particularly, the individual or subject is a human.

[0167] The term “pharmaceutical composition” refers to a preparation which is in such form as to permit the biological activity of an active ingredient contained therein to be effective, and which contains no additional components which are unacceptably toxic to a subject to which the formulation would be administered.

[0168] A “pharmaceutically acceptable carrier” refers to an ingredient in a pharmaceutical composition, other than an active ingredient, which is nontoxic to a subject. A pharmaceutically acceptable carrier includes, but is not limited to, a buffer, excipient, stabilizer, or preservative.

[0169] As used herein, “treatment” (and grammatical variations thereof such as “treat” or “treating”) refers to clinical intervention in an attempt to alter the natural course of a disease in the individual being treated, and can be performed either for prophylaxis or during the course of clinical pathology. Desirable effects of treatment include, but are not limited to, preventing occurrence or recurrence of disease, alleviation of symptoms, diminishment of any direct or indirect pathological consequences of the disease, preventing metastasis, decreasing the rate of disease progression, amelioration or palliation of the disease state, and remission or improved prognosis. In some embodiments, T cell activating bispecific antigen binding molecules of the invention are used to delay development of a disease or to slow the progression of a disease.

[0170] The term “package insert” is used to refer to instructions customarily included in commercial packages of therapeutic products, that contain information about the indications, usage, dosage, administration, combination therapy, contraindications and/or warnings concerning the use of such therapeutic products.

### DETAILED DESCRIPTION OF THE EMBODIMENTS

[0171] In a first aspect the invention provides a T cell activating bispecific antigen binding molecule comprising a first and a second antigen binding moiety, one of which is a Fab molecule capable of specific binding to an activating T cell antigen and the other one of which is a Fab molecule capable of specific binding to a target cell antigen, and an IgG₄ Fc domain composed of a first and a second subunit capable of stable association; wherein the first antigen binding moiety is
[0172] (a) a single chain Fab molecule wherein the Fab light chain and the Fab heavy chain are connected by a peptide linker, or
[0173] (b) a crossover Fab molecule wherein either the variable or the constant regions of the Fab light chain and the Fab heavy chain are exchanged.

[0174] In some embodiments, the activating T cell antigen is CD3.

[0175] In a particular embodiment, the first antigen binding moiety is a Fab molecule capable of specific binding to CD3, comprising at least one heavy chain complementarity determining region (CDR) selected from the group consisting of SEQ ID NO: 270, SEQ ID NO: 271 and SEQ ID NO: 272 and at least one light chain CDR selected from the group of SEQ ID NO: 274, SEQ ID NO: 275, SEQ ID NO: 276.

[0176] In one embodiment the first antigen binding moiety is a Fab molecule capable of specific binding to CD3 comprising a heavy chain variable region comprising an amino acid sequence selected from the group of: SEQ ID NO: 269, SEQ ID NO: 298 and SEQ ID NO: 299 and a light chain variable region comprising an amino acid sequence selected from the group of: SEQ ID NO: 273 and SEQ ID NO: 297.

[0177] In one embodiment the first antigen binding moiety is a Fab molecule capable of specific binding to CD3 comprising a heavy chain variable region comprising the amino acid sequence of SEQ ID NO: 269 and a light chain variable region comprising the amino acid sequence of SEQ ID NO: 273.

[0178] In a specific embodiment the second antigen binding moiety is capable of specific binding to CEA and comprises at least one heavy chain complementarity determining region (CDR) selected from the group consisting of SEQ ID NO: 290, SEQ ID NO: 291 and SEQ ID NO: 292 and at least one light chain CDR selected from the group of SEQ ID NO: 294, SEQ ID NO: 295 and SEQ ID NO: 296.

[0179] In another specific embodiment, the second antigen binding moiety is capable of specific binding to CEA and comprises a heavy chain variable region comprising the amino acid sequence of SEQ ID NO: 289 and a light chain variable region comprising the amino acid sequence of SEQ ID NO: 293.

[0180] In another specific embodiment, the second antigen binding moiety is capable of specific binding to MCSP and comprises at least one heavy chain complementarity determining region (CDR) selected from the group consisting of SEQ ID NO: 280, SEQ ID NO: 281, SEQ ID NO: 282, SEQ ID NO: 301, SEQ ID NO: 303, SEQ ID NO: 304 and SEQ ID NO: 306 and at least one light chain CDR selected from the group of SEQ ID NO: 284, SEQ ID NO: 285, SEQ ID NO: 286, SEQ ID NO: 310, SEQ ID NO: 311, SEQ ID NO: 314, SEQ ID NO: 315 and SEQ ID NO: 316.

[0181] In another specific embodiment, the second antigen binding moiety is capable of specific binding to MCSP and comprises at least one heavy chain complementarity determining region (CDR) selected from the group consisting of SEQ ID NO: 280, SEQ ID NO: 281 and SEQ ID NO: 282 and at least one light chain CDR selected from the group of SEQ ID NO: 284, SEQ ID NO: 285 and SEQ ID NO: 286.

[0182] In another specific embodiment, the second antigen binding moiety is capable of specific binding to MCSP and comprises a heavy chain variable region comprising an amino acid sequence selected from the group of SEQ ID NO: 279, SEQ ID NO: 300, SEQ ID NO: 302, SEQ ID NO: 305 and SEQ ID NO: 307 and a light chain variable region comprising an amino acid sequence selected from the group of SEQ ID NO: 283, SEQ ID NO: 309, SEQ ID NO: 312, SEQ ID NO: 313 and SEQ ID NO: 317.

[0183] In another specific embodiment, the second antigen binding moiety is capable of specific binding to MCSP and comprises a heavy chain variable region comprising the amino acid sequence of SEQ ID NO: 279 and a light chain variable region comprising the amino acid sequence of SEQ ID NO: 283.

[0184] In one embodiment the present invention provides a T cell activating bispecific antigen binding molecule comprising

(i) a first antigen binding moiety which is a Fab molecule capable of specific binding to CD3, comprising at least one heavy chain complementarity determining region (CDR) selected from the group consisting of SEQ ID NO: 270, SEQ ID NO: 271 and SEQ ID NO: 272 and at least one light chain CDR selected from the group of SEQ ID NO: 274, SEQ ID NO: 275, SEQ ID NO: 276;
(ii) a second antigen binding moiety which is a Fab molecule capable of specific binding to CEA comprising at least one heavy chain complementarity determining region (CDR) selected from the group consisting of SEQ ID NO: 290, SEQ ID NO: 291 and SEQ ID NO: 292 and at least one light chain CDR selected from the group of SEQ ID NO: 294, SEQ ID NO: 295 and SEQ ID NO: 296.

[0185] In one embodiment the present invention provides a T cell activating bispecific antigen binding molecule comprising

(i) a first antigen binding moiety which is a Fab molecule capable of specific binding to CD3 comprising a heavy chain variable region comprising the amino acid sequence of SEQ ID NO: 269 and a light chain variable region comprising the amino acid sequence of SEQ ID NO: 273.
(ii) a second antigen binding moiety which is a Fab molecule capable of specific binding CEA comprising a heavy chain variable region comprising the amino acid sequence of SEQ ID NO: 289 and a light chain variable region comprising the amino acid sequence of SEQ ID NO: 293.

[0186] In one embodiment the present invention provides a T cell activating bispecific antigen binding molecule comprising

(i) a first antigen binding moiety which is a Fab molecule capable of specific binding to CD3, comprising at least one heavy chain complementarity determining region (CDR) selected from the group consisting of SEQ ID NO: 270, SEQ ID NO: 271 and SEQ ID NO: 272 and at least one light chain CDR selected from the group of SEQ ID NO: 274, SEQ ID NO: 275, SEQ ID NO: 276;
(ii) a second antigen binding moiety which is a Fab molecule capable of specific binding MCSP comprising at least one heavy chain complementarity determining region (CDR) selected from the group consisting of SEQ ID NO: 280, SEQ ID NO: 281 and SEQ ID NO: 282 and at least one light chain CDR selected from the group of SEQ ID NO: 284, SEQ ID NO: 285 and SEQ ID NO: 286.

[0187] In one embodiment the present invention provides a T cell activating bispecific antigen binding molecule comprising

(i) a first antigen binding moiety which is a Fab molecule capable of specific binding to CD3 comprising a heavy chain variable region comprising the amino acid sequence of SEQ ID NO: 269 and a light chain variable region comprising the amino acid sequence of SEQ ID NO: 273.
(ii) a second antigen binding moiety which is a Fab molecule capable of specific binding MCSP comprising a heavy chain variable region comprising the amino acid sequence of SEQ ID NO: 279 and a light chain variable region comprising the amino acid sequence of SEQ ID NO: 283.

[0188] In a particular embodiment, the first antigen binding moiety is a crossover Fab molecule wherein either the variable or the constant regions of the Fab light chain and the Fab heavy chain are exchanged. In an even more particular embodiment, the first antigen binding moiety is a crossover Fab molecule wherein the constant regions of the Fab light chain and the Fab heavy chain are exchanged.

[0189] In one embodiment, the second antigen binding moiety is a conventional Fab molecule.

[0190] In a further particular embodiment, not more than one antigen binding moiety capable of specific binding to CD3 is present in the T cell activating bispecific antigen binding molecule (i.e. the T cell activating bispecific antigen binding molecule provides monovalent binding to CD3).

[0191] In one embodiment the present invention provides a T cell activating bispecific antigen binding molecule comprising

(i) a first antigen binding moiety which is a Fab molecule capable of specific binding to CD3, comprising the heavy chain complementarity determining region (CDR) 1 of SEQ ID NO: 270, the heavy chain CDR 2 of SEQ ID NO: 271, the heavy chain CDR 3 of SEQ ID NO: 272, the light chain CDR 1 of SEQ ID NO: 274, the light chain CDR 2 of SEQ ID NO: 275 and the light chain CDR 3 of SEQ ID NO: 276, wherein the first antigen binding moiety is a crossover Fab molecule wherein either the variable or the constant regions, particularly the constant regions, of the Fab light chain and the Fab heavy chain are exchanged;
(ii) a second and a third antigen binding moiety each of which is a Fab molecule capable of specific binding to CEA comprising the heavy chain CDR 1 of SEQ ID NO: 290, the heavy chain CDR 2 of SEQ ID NO: 291, the heavy chain CDR 3 of SEQ ID NO: 292, the light chain CDR 1 of SEQ ID NO: 294, the light chain CDR 2 of SEQ ID NO: 295 and the light chain CDR3 of SEQ ID NO: 296; and
(iii) an IgG₄ Fc domain composed of a first and a second subunit capable of stable association.

[0192] In one embodiment the present invention provides a T cell activating bispecific antigen binding molecule comprising

(i) a first antigen binding moiety which is a Fab molecule capable of specific binding to CD3 comprising a heavy chain variable region comprising an amino acid sequence that is at least about 95%, 96%, 97%, 98%, 99% or 100% identical to the amino acid sequence of SEQ ID NO: 269 and a light chain variable region comprising an amino acid sequence that is at least about 95%, 96%, 97%, 98%, 99% or 100% identical to the amino acid sequence of SEQ ID NO: 273, wherein the first antigen binding moiety is a crossover Fab molecule wherein either the variable or the constant regions, particularly the constant regions, of the Fab light chain and the Fab heavy chain are exchanged;
(ii) a second and a third antigen binding moiety each of which is a Fab molecule capable of specific binding to CEA comprising heavy chain variable region comprising an amino acid sequence that is at least about 95%, 96%, 97%, 98%, 99% or 100% identical to the amino acid sequence of SEQ ID NO: 289 and a light chain variable region comprising an amino acid sequence that is at least about 95%, 96%, 97%, 98%, 99% or 100% identical to the amino acid sequence of SEQ ID NO: 293; and
(iii) an IgG₄ Fc domain composed of a first and a second subunit capable of stable association.

[0193] In one embodiment the present invention provides a T cell activating bispecific antigen binding molecule comprising

(i) a first antigen binding moiety which is a Fab molecule capable of specific binding to CD3, comprising the heavy chain complementarity determining region (CDR) 1 of SEQ ID NO: 270, the heavy chain CDR 2 of SEQ ID NO: 271, the heavy chain CDR 3 of SEQ ID NO: 272, the light chain CDR 1 of SEQ ID NO: 274, the light chain CDR 2 of SEQ ID NO: 275 and the light chain CDR 3 of SEQ ID NO: 276, wherein the first antigen binding moiety is a crossover Fab molecule wherein either the variable or the constant regions, particularly the constant regions, of the Fab light chain and the Fab heavy chain are exchanged;
(ii) a second and a third antigen binding moiety each of which is a Fab molecule capable of specific binding to MCSP comprising the heavy chain CDR 1 of SEQ ID NO: 280, the heavy chain CDR 2 of SEQ ID NO: 281, the heavy chain CDR 3 of SEQ ID NO: 282, the light chain CDR 1 of SEQ ID NO: 284, the light chain CDR 2 of SEQ ID NO: 285 and the light chain CDR3 of SEQ ID NO: 286; and
(iii) an IgG₄ Fc domain composed of a first and a second subunit capable of stable association.

[0194] In one embodiment the present invention provides a T cell activating bispecific antigen binding molecule comprising

(i) a first antigen binding moiety which is a Fab molecule capable of specific binding to CD3 comprising a heavy chain variable region comprising an amino acid sequence that is at least about 95%, 96%, 97%, 98%, 99% or 100% identical to the amino acid sequence of SEQ ID NO: 269 and a light chain variable region comprising an amino acid sequence that is at least about 95%, 96%, 97%, 98%, 99% or 100% identical to the amino acid sequence of SEQ ID NO: 273, wherein the first antigen binding moiety is a crossover Fab molecule wherein either the variable or the constant regions, particularly the constant regions, of the Fab light chain and the Fab heavy chain are exchanged;
(ii) a second and a third antigen binding moiety each of which is a Fab molecule capable of specific binding to MCSP comprising a heavy chain variable region comprising an amino acid sequence that is at least about 95%, 96%, 97%, 98%, 99% or 100% identical to the amino acid sequence of SEQ ID NO: 279 and a light chain variable region comprising an amino acid sequence that is at least about 95%, 96%, 97%, 98%, 99% or 100% identical to the amino acid sequence of SEQ ID NO: 283; and
(iii) an IgG₄ Fc domain composed of a first and a second subunit capable of stable association.

[0195] In the T cell activating bispecific antigen binding molecule according to any of the four above embodiments preferably the second antigen binding moiety is fused at the C-terminus of the Fab heavy chain to the N-terminus of the Fab heavy chain of the first antigen binding moiety, and the first antigen binding moiety is fused at the C-terminus of the Fab heavy chain to the N-terminus of the first subunit of the IgG₄ Fc domain, and the third antigen binding moiety is fused at the C-terminus of the Fab heavy chain to the N-terminus of the second subunit of the IgG₄ Fc domain.

### T Cell Activating Bispecific Antigen Binding Molecule Formats

[0196] The components of the T cell activating bispecific antigen binding molecule can be fused to each other in a variety of configurations. Exemplary configurations are depicted in FIG. 1.

[0197] In some embodiments, the second antigen binding moiety is fused at the C-terminus of the Fab heavy chain to the N-terminus of the first or the second subunit of the Fc domain.

[0198] In a particular such embodiment, the first antigen binding moiety is fused at the C-terminus of the Fab heavy chain to the N-terminus of the Fab heavy chain of the second antigen binding moiety. In a specific such embodiment, the T cell activating bispecific antigen binding molecule essentially consists of a first and a second antigen binding moiety, an Fc domain composed of a first and a second subunit, and optionally one or more peptide linkers, wherein the first antigen binding moiety is fused at the C-terminus of the Fab heavy chain to the N-terminus of the Fab heavy chain of the second antigen binding moiety, and the second antigen binding moiety is fused at the C-terminus of the Fab heavy chain to the N-terminus of the first or the second subunit of the Fc domain. In an even more specific embodiment, the first antigen binding moiety is a single chain Fab molecule. Alternatively, in a particular embodiment, the first antigen binding moiety is a crossover Fab molecule. Optionally, if the first antigen binding moiety is a crossover Fab molecule, the Fab light chain of the first antigen binding moiety and the Fab light chain of the second antigen binding moiety may additionally be fused to each other.

[0199] In an alternative such embodiment, the first antigen binding moiety is fused at the C-terminus of the Fab heavy chain to the N-terminus of the first or second subunit of the Fc domain. In a specific such embodiment, the T cell activating bispecific antigen binding molecule essentially consists of a first and a second antigen binding moiety, an Fc domain composed of a first and a second subunit, and optionally one or more peptide linkers, wherein the first and the second antigen binding moiety are each fused at the C-terminus of the Fab heavy chain to the N-terminus of one of the subunits of the Fc domain. In an even more specific embodiment, the first antigen binding moiety is a single chain Fab molecule. Alternatively, in a particular embodiment, the first antigen binding moiety is a crossover Fab molecule.

[0200] In yet another such embodiment, the second antigen binding moiety is fused at the C-terminus of the Fab light chain to the N-terminus of the Fab light chain of the first antigen binding moiety. In a specific such embodiment, the T cell activating bispecific antigen binding molecule essentially consists of a first and a second antigen binding moiety, an Fc domain composed of a first and a second subunit, and optionally one or more peptide linkers, wherein the first antigen binding moiety is fused at the N-terminus of the Fab light chain to the C-terminus of the Fab light chain of the second antigen binding moiety, and the second antigen binding moiety is fused at the C-terminus of the Fab heavy chain to the N-terminus of the first or the second subunit of the Fc domain. In an even more specific embodiment, the first antigen binding moiety is a crossover Fab molecule.

[0201] In other embodiments, the first antigen binding moiety is fused at the C-terminus of the Fab heavy chain to the N-terminus of the first or second subunit of the Fc domain.

[0202] In a particular such embodiment, the second antigen binding moiety is fused at the C-terminus of the Fab heavy chain to the N-terminus of the Fab heavy chain of the first antigen binding moiety. In a specific such embodiment, the T cell activating bispecific antigen binding molecule essentially consists of a first and a second antigen binding moiety, an Fc domain composed of a first and a second subunit, and optionally one or more peptide linkers, wherein the second antigen binding moiety is fused at the C-terminus of the Fab heavy chain to the N-terminus of the Fab heavy chain of the first antigen binding moiety, and the first antigen binding moiety is fused at the C-terminus of the Fab heavy chain to the N-terminus of the first or the second subunit of the Fc domain. In an even more specific embodiment, the first antigen binding moiety is a crossover Fab molecule. Optionally, the Fab light chain of the first antigen binding moiety and the Fab light chain of the second antigen binding moiety may additionally be fused to each other.

[0203] In particular of these embodiments, the first antigen binding moiety is capable of specific binding to an activating T cell antigen. In other embodiments, the first antigen binding moiety is capable of specific binding to a target cell antigen.

[0204] The antigen binding moieties may be fused to the Fc domain or to each other directly or through a peptide linker, comprising one or more amino acids, typically about 2-20 amino acids. Peptide linkers are known in the art and are described herein. Suitable, non-immunogenic peptide linkers include, for example, (G₄S)ₙ, (SG₄)ₙ, (G₄S)ₙ or G₄(SG₄)ₙ peptide linkers. “n” is generally a number between 1 and 10, typically between 2 and 4. A particularly suitable peptide linker for fusing the Fab light chains of the first and the second antigen binding moiety to each other is (G₄S)₂. An exemplary peptide linker suitable for connecting the Fab heavy chains of the first and the second antigen binding moiety is EPKSC(D)-(G₄S)₂ (SEQ ID NOs 150 and 151). Additionally, linkers may comprise (a portion of) an immunoglobulin hinge region. Particularly where an antigen binding moiety is fused to the N-terminus of an Fc domain subunit, it may be fused via an immunoglobulin hinge region or a portion thereof, with or without an additional peptide linker.

[0205] A T cell activating bispecific antigen binding molecule with a single antigen binding moiety capable of specific binding to a target cell antigen (for example as shown in FIG. 1A, 1B, 1D, 1E, 1H, 1I, 1K or 1M) is useful, particularly in cases where internalization of the target cell antigen is to be expected following binding of a high affinity antigen binding moiety. In such cases, the presence of more than one antigen binding moiety specific for the target cell antigen may enhance internalization of the target cell antigen, thereby reducing its availability.

[0206] In many other cases, however, it will be advantageous to have a T cell activating bispecific antigen binding molecule comprising two or more antigen binding moieties specific for a target cell antigen (see examples in shown in FIG. 1C, 1F, 1G, 1J or 1L), for example to optimize targeting to the target site or to allow crosslinking of target cell antigens.

[0207] Accordingly, in certain embodiments, the T cell activating bispecific antigen binding molecule of the invention further comprises a third antigen binding moiety which is a Fab molecule capable of specific binding to a target cell antigen. In one embodiment, the third antigen binding moiety is capable of specific binding to the same target cell antigen as the first or second antigen binding moiety. In a particular embodiment, the first antigen binding moiety is capable of specific binding to an activating T cell antigen, and the second and third antigen binding moieties are capable of specific binding to a target cell antigen.

[0208] In one embodiment, the third antigen binding moiety is fused at the C-terminus of the Fab heavy chain to the N-terminus of the first or second subunit of the Fc domain. In a particular embodiment, the second and the third antigen binding moiety are each fused at the C-terminus of the Fab heavy chain to the N-terminus of one of the subunits of the Fc domain, and the first antigen binding moiety is fused at the C-terminus of the Fab heavy chain to the N-terminus of the Fab heavy chain of the second antigen binding moiety. In one such embodiment the first antigen binding moiety is a single chain Fab molecule. In a particular such embodiment the first antigen binding moiety is a crossover Fab molecule. Optionally, if the first antigen binding moiety is a crossover Fab molecule, the Fab light chain of the first antigen binding moiety and the Fab light chain of the second antigen binding moiety may additionally be fused to each other.

[0209] The second and the third antigen binding moiety may be fused to the Fc domain directly or through a peptide linker. In a particular embodiment the second and the third antigen binding moiety are each fused to the Fc domain through an immunoglobulin hinge region. In a specific embodiment, the immunoglobulin hinge region is a human IgG₁ hinge region. In one embodiment the second and the third antigen binding moiety and the Fc domain are part of an immunoglobulin molecule. In a particular embodiment the immunoglobulin molecule is an IgG class immunoglobulin. In an even more particular embodiment the immunoglobulin is an IgG₁ subclass immunoglobulin. In another embodiment the immunoglobulin is an IgG₄ subclass immunoglobulin. In a further particular embodiment the immunoglobulin is a human immunoglobulin. In other embodiments the immunoglobulin is a chimeric immunoglobulin or a humanized immunoglobulin. In one embodiment, the T cell activating bispecific antigen binding molecule essentially consists of an immunoglobulin molecule capable of specific binding to a target cell antigen, and an antigen binding moiety capable of specific binding to an activating T cell antigen wherein the antigen binding moiety is a single chain Fab molecule or a crossover Fab molecule, particularly a crossover Fab molecule, fused to the N-terminus of one of the immunoglobulin heavy chains, optionally via a peptide linker.

[0210] In an alternative embodiment, the first and the third antigen binding moiety are each fused at the C-terminus of the Fab heavy chain to the N-terminus of one of the subunits of the Fc domain, and the second antigen binding moiety is fused at the C-terminus of the Fab heavy chain to the N-terminus of the Fab heavy chain of the first antigen binding moiety. In a specific such embodiment, the T cell activating bispecific antigen binding molecule essentially consists of a first, a second and a third antigen binding moiety, an Fc domain composed of a first and a second subunit, and optionally one or more peptide linkers, wherein the second antigen binding moiety is fused at the C-terminus of the Fab heavy chain to the N-terminus of the Fab heavy chain of the first antigen binding moiety, and the first antigen binding moiety is fused at the C-terminus of the Fab heavy chain to the N-terminus of the first subunit of the Fc domain, and wherein the third antigen binding moiety is fused at the C-terminus of the Fab heavy chain to the N-terminus of the second subunit of the Fc domain. In a particular such embodiment the first antigen binding moiety is a crossover Fab molecule. Optionally, the Fab light chain of the first antigen binding moiety and the Fab light chain of the second antigen binding moiety may additionally be fused to each other.

[0211] In some of the T cell activating bispecific antigen binding molecule of the invention, the Fab light chain of the first antigen binding moiety and the Fab light chain of the second antigen binding moiety are fused to each other, optionally via a linker peptide. Depending on the configuration of the first and the second antigen binding moiety, the Fab light chain of the first antigen binding moiety may be fused at its C-terminus to the N-terminus of the Fab light chain of the second antigen binding moiety, or the Fab light chain of the second antigen binding moiety may be fused at its C-terminus to the N-terminus of the Fab light chain of the first antigen binding moiety. Fusion of the Fab light chains of the first and the second antigen binding moiety further reduces mispairing of unmatched Fab heavy and light chains, and also reduces the number of plasmids needed for expression of some of the T cell activating bispecific antigen binding molecules of the invention.

[0212] In certain embodiments the T cell activating bispecific antigen binding molecule comprises a polypeptide wherein a first Fab light chain shares a carboxy-terminal peptide bond with a peptide linker, which in turn shares a carboxy-terminal peptide bond with a first Fab heavy chain, which in turn shares a carboxy-terminal peptide bond with an Fc domain subunit (VL-CL-linker-VH-CH1-CH2-CH2(—CH4)), and a polypeptide wherein a second Fab heavy chain shares a carboxy-terminal peptide bond with an Fc domain subunit (VH-CH1-CH2-CH3(—CH4)). In some embodiments the T cell activating bispecific antigen binding molecule further comprises a second Fab light chain polypeptide (VL-CL). In certain embodiments the polypeptides are covalently linked, e.g., by a disulfide bond.

[0213] In some embodiments, the T cell activating bispecific antigen binding molecule comprises a polypeptide wherein a first Fab light chain shares a carboxy-terminal peptide bond with a peptide linker, which in turn shares a carboxy-terminal peptide bond with a first Fab heavy chain, which in turn shares a carboxy-terminal peptide bond with a second Fab heavy chain, which in turn shares a carboxy-terminal peptide bond with an Fc domain subunit (VL-CL-linker-VH-CH1-VH-CH1-CH2-CH3(—CH4)). In one of these embodiments that T cell activating bispecific antigen binding molecule further comprises a second Fab light chain polypeptide (VL-CL). The T cell activating bispecific antigen binding molecule according to these embodiments may further comprise (i) an Fc domain subunit polypeptide (CH2-CH3(—CH4)), or (ii) a polypeptide wherein a third Fab heavy chain shares a carboxy-terminal peptide bond with an Fc domain subunit (VH-CH1-CH2-CH3(—CH4)) and a third Fab light chain polypeptide (VL-CL). In certain embodiments the polypeptides are covalently linked, e.g., by a disulfide bond.

[0214] In certain embodiments the T cell activating bispecific antigen binding molecule comprises a polypeptide wherein a first Fab light chain variable region shares a carboxy-terminal peptide bond with a first Fab heavy chain constant region (i.e. a crossover Fab heavy chain, wherein the heavy chain variable region is replaced by a light chain variable region), which in turn shares a carboxy-terminal peptide bond with an Fc domain subunit (VL-CH1-CH2-CH3(—CH4)), and a polypeptide wherein a second Fab heavy chain shares a carboxy-terminal peptide bond with an Fc domain subunit (VH-CH1-CH2-CH3(—CH4)). In some embodiments the T cell activating bispecific antigen binding molecule further comprises a polypeptide wherein a Fab heavy chain variable region shares a carboxy-terminal peptide bond with a Fab light chain constant region (VH-CL) and a Fab light chain polypeptide (VL-CL). In certain embodiments the polypeptides are covalently linked, e.g., by a disulfide bond.

[0215] In alternative embodiments the T cell activating bispecific antigen binding molecule comprises a polypeptide wherein a first Fab heavy chain variable region shares a carboxy-terminal peptide bond with a first Fab light chain constant region (i.e. a crossover Fab heavy chain, wherein the heavy chain constant region is replaced by a light chain constant region), which in turn shares a carboxy-terminal peptide bond with an Fc domain subunit (VH-CL-CH2-CH3(—CH4)), and a polypeptide wherein a second Fab heavy chain shares a carboxy-terminal peptide bond with an Fc domain subunit (VH-CH1-CH2-CH3(—CH4)). In some embodiments the T cell activating bispecific antigen binding molecule further comprises a polypeptide wherein a Fab light chain variable region shares a carboxy-terminal peptide bond with a Fab heavy chain constant region (VL-CH1) and a Fab light chain polypeptide (VL-CL). In certain embodiments the polypeptides are covalently linked, e.g., by a disulfide bond.

[0216] In some embodiments, the T cell activating bispecific antigen binding molecule comprises a polypeptide wherein a first Fab light chain variable region shares a carboxy-terminal peptide bond with a first Fab heavy chain constant region (i.e. a crossover Fab heavy chain, wherein the heavy chain variable region is replaced by a light chain variable region), which in turn shares a carboxy-terminal peptide bond with a second Fab heavy chain, which in turn shares a carboxy-terminal peptide bond with an Fc domain subunit (VL-CH1-VH-CH1-CH2-CH3(—CH4)). In other embodiments, the T cell activating bispecific antigen binding molecule comprises a polypeptide wherein a first Fab heavy chain variable region shares a carboxy-terminal peptide bond with a first Fab light chain constant region (i.e. a crossover Fab heavy chain, wherein the heavy chain constant region is replaced by a light chain constant region), which in turn shares a carboxy-terminal peptide bond with a second Fab heavy chain, which in turn shares a carboxy-terminal peptide bond with an Fc domain subunit (VH-CL-VH-CH1-CH2-CH3(—CH4)). In still other embodiments, the T cell activating bispecific antigen binding molecule comprises a polypeptide wherein a second Fab heavy chain shares a carboxy-terminal peptide bond with a first Fab light chain variable region which in turn shares a carboxy-terminal peptide bond with a first Fab heavy chain constant region (i.e. a crossover Fab heavy chain, wherein the heavy chain variable region is replaced by a light chain variable region), which in turn shares a carboxy-terminal peptide bond with an Fc domain subunit (VH-CH1-VL-CH1-CH2-CH3(—CH4)). In other embodiments, the T cell activating bispecific antigen binding molecule comprises a polypeptide wherein a second Fab heavy chain shares a carboxy-terminal peptide bond with a first Fab heavy chain variable region which in turn shares a carboxy-terminal peptide bond with a first Fab light chain constant region (i.e. a crossover Fab heavy chain, wherein the heavy chain constant region is replaced by a light chain constant region), which in turn shares a carboxy-terminal peptide bond with an Fc domain subunit (VH-CH1-VH-CL-CH2-CH3(—CH4)).

[0217] In some of these embodiments the T cell activating bispecific antigen binding molecule further comprises a crossover Fab light chain polypeptide, wherein a Fab heavy chain variable region shares a carboxy-terminal peptide bond with a Fab light chain constant region (VH-CL), and a Fab light chain polypeptide (VL-CL). In others of these embodiments the T cell activating bispecific antigen binding molecule further comprises a crossover Fab light chain polypeptide, wherein a Fab light chain variable region shares a carboxy-terminal peptide bond with a Fab heavy chain constant region (VL-CH1), and a Fab light chain polypeptide (VL-CL). In still others of these embodiments the T cell activating bispecific antigen binding molecule further comprises a polypeptide wherein a Fab light chain variable region shares a carboxy-terminal peptide bond with a Fab heavy chain constant region which in turn shares a carboxy-terminal peptide bond with a Fab light chain polypeptide (VL-CH1-VL-CL), a polypeptide wherein a Fab heavy chain variable region shares a carboxy-terminal peptide bond with a Fab light chain constant region which in turn shares a carboxy-terminal peptide bond with a Fab light chain polypeptide (VH-CL-VL-CL), a polypeptide wherein a Fab light chain polypeptide shares a carboxy-terminal peptide bond with a Fab light chain variable region which in turn shares a carboxy-terminal peptide bond with a Fab heavy chain constant region (VL-CL-VL-CH1), or a polypeptide wherein a Fab light chain polypeptide shares a carboxy-terminal peptide bond with a Fab heavy chain variable region which in turn shares a carboxy-terminal peptide bond with a Fab light chain constant region (VL-CL-VH-CL).

[0218] The T cell activating bispecific antigen binding molecule according to these embodiments may further comprise (i) an Fc domain subunit polypeptide (CH2-CH3(—CH4)), or (ii) a polypeptide wherein a third Fab heavy chain shares a carboxy-terminal peptide bond with an Fc domain subunit (VH-CH1-CH2-CH3(—CH4)) and a third Fab light chain polypeptide (VL-CL). In certain embodiments the polypeptides are covalently linked, e.g., by a disulfide bond.

[0219] In one embodiment, the T cell activating bispecific antigen binding molecule comprises a polypeptide wherein a second Fab light chain shares a carboxy-terminal peptide bond with a first Fab light chain variable region which in turn shares a carboxy-terminal peptide bond with a first Fab heavy chain constant region (i.e. a crossover Fab light chain, wherein the light chain constant region is replaced by a heavy chain constant region) (VL-CL-VL-CH1), a polypeptide wherein a second Fab heavy chain shares a carboxy-terminal peptide bond with an Fc domain subunit (VH-CH1-CH2-CH3(—CH4)), and a polypeptide wherein a first Fab heavy chain variable region shares a carboxy-terminal peptide bond with a first Fab light chain constant region (VH-CL). In another embodiment, the T cell activating bispecific antigen binding molecule comprises a polypeptide wherein a second Fab light chain shares a carboxy-terminal peptide bond with a first Fab heavy chain variable region which in turn shares a carboxy-terminal peptide bond with a first Fab light chain constant region (i.e. a crossover Fab light chain, wherein the light chain variable region is replaced by a heavy chain variable region) (VL-CL-VH-CL), a polypeptide wherein a second Fab heavy chain shares a carboxy-terminal peptide bond with an Fc domain subunit (VH-CH1-CH2-CH3(—CH4)), and a polypeptide wherein a first Fab light chain variable region shares a carboxy-terminal peptide bond with a first Fab heavy chain constant region (VL-CH1). The T cell activating bispecific antigen binding molecule according to these embodiments may further comprise (i) an Fc domain subunit polypeptide (CH2-CH3(—CH4)), or (ii) a polypeptide wherein a third Fab heavy chain shares a carboxy-terminal peptide bond with an Fc domain subunit (VH-CH1-CH2-CH3(—CH4)) and a third Fab light chain polypeptide (VL-CL). In certain embodiments the polypeptides are covalently linked, e.g., by a disulfide bond.

[0220] According to any of the above embodiments, components of the T cell activating bispecific antigen binding molecule (e.g. antigen binding moiety, Fc domain) may be fused directly or through various linkers, particularly peptide linkers comprising one or more amino acids, typically about 2-20 amino acids, that are described herein or are known in the art. Suitable, non-immunogenic peptide linkers include, for example, (G₄S)ₙ, (SG₄)ₙ, (G₄S)ₙ or G₄(SG₄)ₙ peptide linkers, wherein n is generally a number between 1 and 10, typically between 2 and 4.

### Fc Domain

[0221] The Fc domain of the T cell activating bispecific antigen binding molecule consists of a pair of polypeptide chains comprising heavy chain domains of an immunoglobulin molecule. For example, the Fc domain of an immunoglobulin G (IgG) molecule is a dimer, each subunit of which comprises the CH2 and CH3 IgG heavy chain constant domains. The two subunits of the Fc domain are capable of stable association with each other. In one embodiment the T cell activating bispecific antigen binding molecule of the invention comprises not more than one Fc domain.

[0222] In one embodiment according the invention the Fc domain of the T cell activating bispecific antigen binding molecule is an IgG Fc domain. In a particular embodiment the Fc domain is an IgG₁ Fc domain. An exemplary sequence of a human IgG₁ Fc region is given in SEQ ID NO: 149.

[0223] In another embodiment the Fc domain is an IgG₄ Fc domain. In one embodiment, the Fc domain is an IgG₄ Fc domain comprising an amino acid substitution at position 5228 (Kabat numbering), particularly the amino acid substitution S228P. This amino acid substitution reduces in vivo Fab arm exchange of IgG₄ antibodies (see Stubenrauch et al., Drug Metabolism and Disposition 38, 84-91 (2010)). In a further particular embodiment the Fc domain is human. In another embodiment, the Fc domain is an IgG₄ Fc domain comprising an amino acid substitution at position L235 (Kabat numbering), particularly the amino acid substitution L235E. In another embodiment, the Fc domain is an IgG₄ Fc domain comprising both the amino acid substitution S228P and L235E (SPLE). In another embodiment, the Fc domain is an IgG₄ Fc domain comprising the amino acid substitution P329G (Kabat numbering). In another embodiment, the Fc domain is an IgG₄ Fc domain comprising the amino acid substitutions S228P, L235E and P329G.

### Fc Domain Modifications Promoting Heterodimerization

[0224] T cell activating bispecific antigen binding molecules according to the invention comprise different antigen binding moieties, fused to one or the other of the two subunits of the Fc domain, thus the two subunits of the Fc domain are typically comprised in two non-identical polypeptide chains. Recombinant co-expression of these polypeptides and subsequent dimerization leads to several possible combinations of the two polypeptides. To improve the yield and purity of T cell activating bispecific antigen binding molecules in recombinant production, it will thus be advantageous to introduce in the Fc domain of the T cell activating bispecific antigen binding molecule a modification promoting the association of the desired polypeptides.

[0225] Accordingly, in particular embodiments the Fc domain of the T cell activating bispecific antigen binding molecule according to the invention comprises a modification promoting the association of the first and the second subunit of the Fc domain. The site of most extensive protein-protein interaction between the two subunits of a human IgG Fc domain is in the CH3 domain of the Fc domain. Thus, in one embodiment said modification is in the CH3 domain of the Fc domain.

[0226] In a specific embodiment said modification is a so-called “knob-into-hole” modification, comprising a “knob” modification in one of the two subunits of the Fc domain and a “hole” modification in the other one of the two subunits of the Fc domain.

[0227] The knob-into-hole technology is described e.g. in U.S. Pat. No. 5,731,168; U.S. Pat. No. 7,695,936; Ridgway et al., Prot Eng 9, 617-621 (1996) and Carter, J Immunol Meth 248, 7-15 (2001). Generally, the method involves introducing a protuberance (“knob”) at the interface of a first polypeptide and a corresponding cavity (“hole”) in the interface of a second polypeptide, such that the protuberance can be positioned in the cavity so as to promote heterodimer formation and hinder homodimer formation. Protuberances are constructed by replacing small amino acid side chains from the interface of the first polypeptide with larger side chains (e.g. tyrosine or tryptophan). Compensatory cavities of identical or similar size to the protuberances are created in the interface of the second polypeptide by replacing large amino acid side chains with smaller ones (e.g. alanine or threonine).

[0228] Accordingly, in a particular embodiment, in the CH3 domain of the first subunit of the Fc domain of the T cell activating bispecific antigen binding molecule an amino acid residue is replaced with an amino acid residue having a larger side chain volume, thereby generating a protuberance within the CH3 domain of the first subunit which is positionable in a cavity within the CH3 domain of the second subunit, and in the CH3 domain of the second subunit of the Fc domain an amino acid residue is replaced with an amino acid residue having a smaller side chain volume, thereby generating a cavity within the CH3 domain of the second subunit within which the protuberance within the CH3 domain of the first subunit is positionable.

[0229] The protuberance and cavity can be made by altering the nucleic acid encoding the polypeptides, e.g. by site-specific mutagenesis, or by peptide synthesis.

[0230] In a specific embodiment, in the CH3 domain of the first subunit of the Fc domain the threonine residue at position 366 is replaced with a tryptophan residue (T366W), and in the CH3 domain of the second subunit of the Fc domain the tyrosine residue at position 407 is replaced with a valine residue (Y407V). In one embodiment, in the second subunit of the Fc domain additionally the threonine residue at position 366 is replaced with a serine residue (T366S) and the leucine residue at position 368 is replaced with an alanine residue (L368A).

[0231] In yet a further embodiment, in the first subunit of the Fc domain additionally the serine residue at position 354 is replaced with a cysteine residue (S354C), and in the second subunit of the Fc domain additionally the tyrosine residue at position 349 is replaced by a cysteine residue (Y349C). Introduction of these two cysteine residues results in formation of a disulfide bridge between the two subunits of the Fc domain, further stabilizing the dimer (Carter, J Immunol Methods 248, 7-15 (2001)).

[0232] In a particular embodiment the antigen binding moiety capable of binding to an activating T cell antigen is fused (optionally via the antigen binding moiety capable of binding to a target cell antigen) to the first subunit of the Fc domain (comprising the “knob” modification). Without wishing to be bound by theory, fusion of the antigen binding moiety capable of binding to an activating T cell antigen to the knob-containing subunit of the Fc domain will (further) minimize the generation of antigen binding molecules comprising two antigen binding moieties capable of binding to an activating T cell antigen (steric clash of two knob-containing polypeptides).

[0233] In an alternative embodiment a modification promoting association of the first and the second subunit of the Fc domain comprises a modification mediating electrostatic steering effects, e.g. as described in PCT publication WO 2009/089004. Generally, this method involves replacement of one or more amino acid residues at the interface of the two Fc domain subunits by charged amino acid residues so that homodimer formation becomes electrostatically unfavorable but heterodimerization electrostatically favorable.

Fc Domain Modifications Reducing Fc Receptor Binding and/or Effector Function

[0234] The Fc domain confers to the T cell activating bispecific antigen binding molecule favorable pharmacokinetic properties, including a long serum half-life which contributes to good accumulation in the target tissue and a favorable tissue-blood distribution ratio. At the same time it may, however, lead to undesirable targeting of the T cell activating bispecific antigen binding molecule to cells expressing Fc receptors rather than to the preferred antigen-bearing cells. Moreover, the co-activation of Fc receptor signaling pathways may lead to cytokine release which, in combination with the T cell activating properties and the long half-life of the antigen binding molecule, results in excessive activation of cytokine receptors and severe side effects upon systemic administration. Activation of (Fc receptor-bearing) immune cells other than T cells may even reduce efficacy of the T cell activating bispecific antigen binding molecule due to the potential destruction of T cells e.g. by NK cells.

[0235] Accordingly, in particular embodiments the Fc domain of the T cell activating bispecific antigen binding molecules according to the invention exhibits reduced binding affinity to an Fc receptor and/or reduced effector function, as compared to a native IgG₁ Fc domain. In one such embodiment the Fc domain (or the T cell activating bispecific antigen binding molecule comprising said Fc domain) exhibits less than 50%, preferably less than 20%, more preferably less than 10% and most preferably less than 5% of the binding affinity to an Fc receptor, as compared to a native IgG₁ Fc domain (or a T cell activating bispecific antigen binding molecule comprising a native IgG₁ Fc domain), and/or less than 50%, preferably less than 20%, more preferably less than 10% and most preferably less than 5% of the effector function, as compared to a native IgG₁ Fc domain (or a T cell activating bispecific antigen binding molecule comprising a native IgG₁ Fc domain). In one embodiment, the Fc domain (or the T cell activating bispecific antigen binding molecule comprising said Fc domain) does not substantially bind to an Fc receptor and/or induce effector function. In a particular embodiment the Fc receptor is an Fcγ receptor. In one embodiment the Fc receptor is a human Fc receptor. In one embodiment the Fc receptor is an activating Fc receptor. In a specific embodiment the Fc receptor is an activating human Fcγ receptor, more specifically human FcγRIIIa, FcγRI or FcγRIIa, most specifically human FcγRIIIa. In one embodiment the effector function is one or more selected from the group of CDC, ADCC, ADCP, and cytokine secretion. In a particular embodiment the effector function is ADCC. In one embodiment the Fc domain exhibits substantially similar binding affinity to neonatal Fc receptor (FcRn), as compared to a native IgG₁ Fc domain. Substantially similar binding to FcRn is achieved when the Fc domain (or the T cell activating bispecific antigen binding molecule comprising said Fc domain) exhibits greater than about 70%, particularly greater than about 80%, more particularly greater than about 90% of the binding affinity of a native IgG₁ Fc domain (or the T cell activating bispecific antigen binding molecule comprising a native IgG₁ Fc domain) to FcRn.

[0236] In certain embodiments the Fc domain is engineered to have reduced binding affinity to an Fc receptor and/or reduced effector function, as compared to a non-engineered Fc domain. In particular embodiments, the Fc domain of the T cell activating bispecific antigen binding molecule comprises one or more amino acid mutation that reduces the binding affinity of the Fc domain to an Fc receptor and/or effector function. Typically, the same one or more amino acid mutation is present in each of the two subunits of the Fc domain. In one embodiment the amino acid mutation reduces the binding affinity of the Fc domain to an Fc receptor. In one embodiment the amino acid mutation reduces the binding affinity of the Fc domain to an Fc receptor by at least 2-fold, at least 5-fold, or at least 10-fold. In embodiments where there is more than one amino acid mutation that reduces the binding affinity of the Fc domain to the Fc receptor, the combination of these amino acid mutations may reduce the binding affinity of the Fc domain to an Fc receptor by at least 10-fold, at least 20-fold, or even at least 50-fold. In one embodiment the T cell activating bispecific antigen binding molecule comprising an engineered Fc domain exhibits less than 20%, particularly less than 10%, more particularly less than 5% of the binding affinity to an Fc receptor as compared to a T cell activating bispecific antigen binding molecule comprising a non-engineered Fc domain. In a particular embodiment the Fc receptor is an Fcγ receptor. In some embodiments the Fc receptor is a human Fc receptor. In some embodiments the Fc receptor is an activating Fc receptor. In a specific embodiment the Fc receptor is an activating human Fcγ receptor, more specifically human FcγRIIIa, FcγRI or FcγRIIa, most specifically human FcγRIIIa. Preferably, binding to each of these receptors is reduced. In some embodiments binding affinity to a complement component, specifically binding affinity to C1q, is also reduced. In one embodiment binding affinity to neonatal Fc receptor (FcRn) is not reduced. Substantially similar binding to FcRn, i.e. preservation of the binding affinity of the Fc domain to said receptor, is achieved when the Fc domain (or the T cell activating bispecific antigen binding molecule comprising said Fc domain) exhibits greater than about 70% of the binding affinity of a non-engineered form of the Fc domain (or the T cell activating bispecific antigen binding molecule comprising said non-engineered form of the Fc domain) to FcRn. The Fc domain, or T cell activating bispecific antigen binding molecules of the invention comprising said Fc domain, may exhibit greater than about 80% and even greater than about 90% of such affinity. In certain embodiments the Fc domain of the T cell activating bispecific antigen binding molecule is engineered to have reduced effector function, as compared to a non-engineered Fc domain. The reduced effector function can include, but is not limited to, one or more of the following: reduced complement dependent cytotoxicity (CDC), reduced antibody-dependent cell-mediated cytotoxicity (ADCC), reduced antibody-dependent cellular phagocytosis (ADCP), reduced cytokine secretion, reduced immune complex-mediated antigen uptake by antigen-presenting cells, reduced binding to NK cells, reduced binding to macrophages, reduced binding to monocytes, reduced binding to polymorphonuclear cells, reduced direct signaling inducing apoptosis, reduced crosslinking of target-bound antibodies, reduced dendritic cell maturation, or reduced T cell priming. In one embodiment the reduced effector function is one or more selected from the group of reduced CDC, reduced ADCC, reduced ADCP, and reduced cytokine secretion. In a particular embodiment the reduced effector function is reduced ADCC. In one embodiment the reduced ADCC is less than 20% of the ADCC induced by a non-engineered Fc domain (or a T cell activating bispecific antigen binding molecule comprising a non-engineered Fc domain).

[0237] In one embodiment the amino acid mutation that reduces the binding affinity of the Fc domain to an Fc receptor and/or effector function is an amino acid substitution. In one embodiment the Fc domain comprises an amino acid substitution at a position selected from the group of E233, L234, L235, N297, P331 and P329. In a more specific embodiment the Fc domain comprises an amino acid substitution at a position selected from the group of L234, L235 and P329. In some embodiments the Fc domain comprises the amino acid substitutions L234A and L235A. In one such embodiment, the Fc domain is an IgG₁ Fc domain, particularly a human IgG₁ Fc domain. In one embodiment the Fc domain comprises an amino acid substitution at position P329. In a more specific embodiment the amino acid substitution is P329A or P329G, particularly P329G. In one embodiment the Fc domain comprises an amino acid substitution at position P329 and a further amino acid substitution at a position selected from E233, L234, L235, N297 and P331. In a more specific embodiment the further amino acid substitution is E233P, L234A, L235A, L235E, N297A, N297D or P331 S. In particular embodiments the Fc domain comprises amino acid substitutions at positions P329, L234 and L235. In more particular embodiments the Fc domain comprises the amino acid mutations L234A, L235A and P329G (“P329G LALA”). In one such embodiment, the Fc domain is an IgG₁ Fc domain, particularly a human IgG₁ Fc domain. The “P329G LALA” combination of amino acid substitutions almost completely abolishes Fcγreceptor binding of a human IgG₁ Fc domain, as described in PCT publication no. WO 2012/130831, incorporated herein by reference in its entirety. WO 2012/130831 also describes methods of preparing such mutant Fc domains and methods for determining its properties such as Fc receptor binding or effector functions.

[0238] IgG₄ antibodies exhibit reduced binding affinity to Fc receptors and reduced effector functions as compared to IgG₁ antibodies. Hence, in some embodiments the Fc domain of the T cell activating bispecific antigen binding molecules of the invention is an IgG₄ Fc domain, particularly a human IgG₄ Fc domain. In one embodiment the IgG₄ Fc domain comprises amino acid substitutions at position 5228, specifically the amino acid substitution S228P. To further reduce its binding affinity to an Fc receptor and/or its effector function, in one embodiment the IgG₄ Fc domain comprises an amino acid substitution at position L235, specifically the amino acid substitution L235E. In another embodiment, the IgG₄ Fc domain comprises an amino acid substitution at position P329, specifically the amino acid substitution P329G. In a particular embodiment, the IgG₄ Fc domain comprises amino acid substitutions at positions S228, L235 and P329, specifically amino acid substitutions S228P, L235E and P329G. Such IgG₄ Fc domain mutants and their Fcγ receptor binding properties are described in PCT patent application no. WO 2012/130831, incorporated herein by reference in its entirety.

[0239] In a particular embodiment the Fc domain exhibiting reduced binding affinity to an Fc receptor and/or reduced effector function, as compared to a native IgG₁ Fc domain, is a human IgG₁ Fc domain comprising the amino acid substitutions L234A, L235A and optionally P329G, or a human IgG₄ Fc domain comprising the amino acid substitutions S228P, L235E and optionally P329G.

[0240] In certain embodiments N-glycosylation of the Fc domain has been eliminated. In one such embodiment the Fc domain comprises an amino acid mutation at position N297, particularly an amino acid substitution replacing asparagine by alanine (N297A) or aspartic acid (N297D).

[0241] In addition to the Fc domains described hereinabove and in PCT publication no. WO 2012/130831, Fc domains with reduced Fc receptor binding and/or effector function also include those with substitution of one or more of Fc domain residues 238, 265, 269, 270, 297, 327 and 329 (U.S. Pat. No. 6,737,056). Such Fc mutants include Fc mutants with substitutions at two or more of amino acid positions 265, 269, 270, 297 and 327, including the so-called “DANA” Fc mutant with substitution of residues 265 and 297 to alanine (U.S. Pat. No. 7,332,581).

[0242] Mutant Fc domains can be prepared by amino acid deletion, substitution, insertion or modification using genetic or chemical methods well known in the art. Genetic methods may include site-specific mutagenesis of the encoding DNA sequence, PCR, gene synthesis, and the like. The correct nucleotide changes can be verified for example by sequencing.

[0243] Binding to Fc receptors can be easily determined e.g. by ELISA, or by Surface Plasmon Resonance (SPR) using standard instrumentation such as a BIAcore instrument (GE Healthcare), and Fc receptors such as may be obtained by recombinant expression. A suitable such binding assay is described herein. Alternatively, binding affinity of Fc domains or cell activating bispecific antigen binding molecules comprising an Fc domain for Fc receptors may be evaluated using cell lines known to express particular Fc receptors, such as human NK cells expressing FcγIIIa receptor.

[0244] Effector function of an Fc domain, or a T cell activating bispecific antigen binding molecule comprising an Fc domain, can be measured by methods known in the art. A suitable assay for measuring ADCC is described herein. Other examples of in vitro assays to assess ADCC activity of a molecule of interest are described in U.S. Pat. No. 5,500,362; Hellstrom et al. Proc Natl Acad Sci USA 83, 7059-7063 (1986) and Hellstrom et al., Proc Natl Acad Sci USA 82, 1499-1502 (1985); U.S. Pat. No. 5,821,337; Bruggemann et al., J Exp Med 166, 1351-1361 (1987). Alternatively, non-radioactive assays methods may be employed (see, for example, ACTI™ non-radioactive cytotoxicity assay for flow cytometry (CellTechnology, Inc. Mountain View, Calif.); and CytoTox 96® non-radioactive cytotoxicity assay (Promega, Madison, Wis.)). Useful effector cells for such assays include peripheral blood mononuclear cells (PBMC) and Natural Killer (NK) cells. Alternatively, or additionally, ADCC activity of the molecule of interest may be assessed in vivo, e.g. in a animal model such as that disclosed in Clynes et al., Proc Natl Acad Sci USA 95, 652-656 (1998).

[0245] In some embodiments, binding of the Fc domain to a complement component, specifically to C1q, is reduced. Accordingly, in some embodiments wherein the Fc domain is engineered to have reduced effector function, said reduced effector function includes reduced CDC. C1q binding assays may be carried out to determine whether the T cell activating bispecific antigen binding molecule is able to bind C1q and hence has CDC activity. See e.g., C1q and C3c binding ELISA in WO 2006/029879 and WO 2005/100402. To assess complement activation, a CDC assay may be performed (see, for example, Gazzano-Santoro et al., J Immunol Methods 202, 163 (1996); Cragg et al., Blood 101, 1045-1052 (2003); and Cragg and Glennie, Blood 103, 2738-2743 (2004)).

### Antigen Binding Moieties

[0246] The antigen binding molecule of the invention is bispecific, i.e. it comprises at least two antigen binding moieties capable of specific binding to two distinct antigenic determinants. According to the invention, the antigen binding moieties are Fab molecules (i.e. antigen binding domains composed of a heavy and a light chain, each comprising a variable and a constant region). In one embodiment said Fab molecules are human. In another embodiment said Fab molecules are humanized. In yet another embodiment said Fab molecules comprise human heavy and light chain constant regions.

[0247] At least one of the antigen binding moieties is a single chain Fab molecule or a crossover Fab molecule. Such modifications prevent mispairing of heavy and light chains from different Fab molecules, thereby improving the yield and purity of the T cell activating bispecific antigen binding molecule of the invention in recombinant production. In a particular single chain Fab molecule useful for the T cell activating bispecific antigen binding molecule of the invention, the C-terminus of the Fab light chain is connected to the N-terminus of the Fab heavy chain by a peptide linker. The peptide linker allows arrangement of the Fab heavy and light chain to form a functional antigen binding moiety. Peptide linkers suitable for connecting the Fab heavy and light chain include, for example, (G₄S)₆-GG (SEQ ID NO: 152) or (SG₃)₂-(SEG₃)₄-(SG₃)-SG (SEQ ID NO: 153). In a particular crossover Fab molecule useful for the T cell activating bispecific antigen binding molecule of the invention, the constant regions of the Fab light chain and the Fab heavy chain are exchanged. In another crossover Fab molecule useful for the T cell activating bispecific antigen binding molecule of the invention, the variable regions of the Fab light chain and the Fab heavy chain are exchanged.

[0248] In a particular embodiment according to the invention, the T cell activating bispecific antigen binding molecule is capable of simultaneous binding to a target cell antigen, particularly a tumor cell antigen, and an activating T cell antigen. In one embodiment, the T cell activating bispecific antigen binding molecule is capable of crosslinking a T cell and a target cell by simultaneous binding to a target cell antigen and an activating T cell antigen. In an even more particular embodiment, such simultaneous binding results in lysis of the target cell, particularly a tumor cell. In one embodiment, such simultaneous binding results in activation of the T cell. In other embodiments, such simultaneous binding results in a cellular response of a T lymphocyte, particularly a cytotoxic T lymphocyte, selected from the group of: proliferation, differentiation, cytokine secretion, cytotoxic effector molecule release, cytotoxic activity, and expression of activation markers. In one embodiment, binding of the T cell activating bispecific antigen binding molecule to the activating T cell antigen without simultaneous binding to the target cell antigen does not result in T cell activation.

[0249] In one embodiment, the T cell activating bispecific antigen binding molecule is capable of re-directing cytotoxic activity of a T cell to a target cell. In a particular embodiment, said re-direction is independent of MHC-mediated peptide antigen presentation by the target cell and and/or specificity of the T cell.

[0250] Particularly, a T cell according to any of the embodiments of the invention is a cytotoxic T cell. In some embodiments the T cell is a CD4⁺ or a CD8⁺ T cell, particularly a CD8⁺ T cell.

### Activating T Cell Antigen Binding Moiety

[0251] The T cell activating bispecific antigen binding molecule of the invention comprises at least one antigen binding moiety capable of binding to an activating T cell antigen (also referred to herein as an “activating T cell antigen binding moiety”). In a particular embodiment, the T cell activating bispecific antigen binding molecule comprises not more than one antigen binding moiety capable of specific binding to an activating T cell antigen. In one embodiment the T cell activating bispecific antigen binding molecule provides monovalent binding to the activating T cell antigen. The activating T cell antigen binding moiety can either be a conventional Fab molecule or a modified Fab molecule, i.e. a single chain or crossover Fab molecule. In embodiments where there is more than one antigen binding moiety capable of specific binding to a target cell antigen comprised in the T cell activating bispecific antigen binding molecule, the antigen binding moiety capable of specific binding to an activating T cell antigen preferably is a modified Fab molecule.

[0252] In a particular embodiment the activating T cell antigen is CD3, particularly human CD3 (SEQ ID NO: 265) or cynomolgus CD3 (SEQ ID NO: 266), most particularly human CD3. In a particular embodiment the activating T cell antigen binding moiety is cross-reactive for (i.e. specifically binds to) human and cynomolgus CD3. In some embodiments, the activating T cell antigen is the epsilon subunit of CD3.

[0253] In one embodiment, the activating T cell antigen binding moiety can compete with monoclonal antibody H2C (described in PCT publication no. WO2008/119567) for binding an epitope of CD3. In another embodiment, the activating T cell antigen binding moiety can compete with monoclonal antibody V9 (described in Rodrigues et al., Int J Cancer Suppl 7, 45-50 (1992) and U.S. Pat. No. 6,054,297) for binding an epitope of CD3. In yet another embodiment, the activating T cell antigen binding moiety can compete with monoclonal antibody FN18 (described in Nooij et al., Eur J Immunol 19, 981-984 (1986)) for binding an epitope of CD3. In a particular embodiment, the activating T cell antigen binding moiety can compete with monoclonal antibody SP34 (described in Pessano et al., EMBO J 4, 337-340 (1985)) for binding an epitope of CD3. In one embodiment, the activating T cell antigen binding moiety binds to the same epitope of CD3 as monoclonal antibody SP34. In one embodiment, the activating T cell antigen binding moiety comprises the heavy chain CDR1 of SEQ ID NO: 163, the heavy chain CDR2 of SEQ ID NO: 165, the heavy chain CDR3 of SEQ ID NO: 167, the light chain CDR1 of SEQ ID NO: 171, the light chain CDR2 of SEQ ID NO: 173, and the light chain CDR3 of SEQ ID NO: 175. In a further embodiment, the activating T cell antigen binding moiety comprises a heavy chain variable region sequence that is at least about 80%, 85%, 90%, 95%, 96%, 97%, 98%, 99% or 100% identical to SEQ ID NO: 169 and a light chain variable region sequence that is at least about 80%, 85%, 90%, 95%, 96%, 97%, 98%, 99% or 100% identical to SEQ ID NO: 177, or variants thereof that retain functionality.

[0254] In a particular embodiment, the activating T cell antigen binding moiety comprises the heavy chain CDR1 of SEQ ID NO: 249, the heavy chain CDR2 of SEQ ID NO: 251, the heavy chain CDR3 of SEQ ID NO: 253, the light chain CDR1 of SEQ ID NO: 257, the light chain CDR2 of SEQ ID NO: 259, and the light chain CDR3 of SEQ ID NO: 261. In one embodiment, the activating T cell antigen binding moiety can compete for binding an epitope of CD3 with an antigen binding moiety comprising the heavy chain CDR1 of SEQ ID NO: 249, the heavy chain CDR2 of SEQ ID NO: 251, the heavy chain CDR3 of SEQ ID NO: 253, the light chain CDR1 of SEQ ID NO: 257, the light chain CDR2 of SEQ ID NO: 259, and the light chain CDR3 of SEQ ID NO: 261. In one embodiment, the activating T cell antigen binding moiety binds to the same epitope of CD3 as an antigen binding moiety comprising the heavy chain CDR1 of SEQ ID NO: 249, the heavy chain CDR2 of SEQ ID NO: 251, the heavy chain CDR3 of SEQ ID NO: 253, the light chain CDR1 of SEQ ID NO: 257, the light chain CDR2 of SEQ ID NO: 259, and the light chain CDR3 of SEQ ID NO: 261. In a further embodiment, the activating T cell antigen binding moiety comprises a heavy chain variable region sequence that is at least about 80%, 85%, 90%, 95%, 96%, 97%, 98%, 99% or 100% identical to SEQ ID NO: 255 and a light chain variable region sequence that is at least about 80%, 85%, 90%, 95%, 96%, 97%, 98%, 99% or 100% identical to SEQ ID NO: 263, or variants thereof that retain functionality. In one embodiment, the activating T cell antigen binding moiety can compete for binding an epitope of CD3 with an antigen binding moiety comprising the heavy chain variable region sequence of SEQ ID NO: 255 and the light chain variable region sequence of SEQ ID NO: 263. In one embodiment, the activating T cell antigen binding moiety binds to the same epitope of CD3 as an antigen binding moiety comprising the heavy chain variable region sequence of SEQ ID NO: 255 and the light chain variable region sequence of SEQ ID NO: 263. In another embodiment, the activating T cell antigen binding moiety comprises a humanized version of the heavy chain variable region sequence of SEQ ID NO: 255 and a humanized version of the light chain variable region sequence of SEQ ID NO: 263. In one embodiment, the activating T cell antigen binding moiety comprises the heavy chain CDR1 of SEQ ID NO: 249, the heavy chain CDR2 of SEQ ID NO: 251, the heavy chain CDR3 of SEQ ID NO: 253, the light chain CDR1 of SEQ ID NO: 257, the light chain CDR2 of SEQ ID NO: 259, the light chain CDR3 of SEQ ID NO: 261, and human heavy and light chain variable region framework sequences.

[0255] In one embodiment the CD3 antigen binding moiety comprises at least one heavy chain complementarity determining region (CDR) selected from the group consisting of SEQ ID NO: 270, SEQ ID NO: 271 and SEQ ID NO: 272 and at least one light chain CDR selected from the group of SEQ ID NO: 274, SEQ ID NO: 275 and SEQ ID NO: 276.

[0256] In one embodiment the CD3 antigen binding moiety comprises the heavy chain CDR1 of SEQ ID NO: 270, the heavy chain CDR2 of SEQ ID NO: 271, the heavy chain CDR3 of SEQ ID NO: 272, the light chain CDR1 of SEQ ID NO: 274, the light chain CDR2 of SEQ ID NO: 275, and the light chain CDR3 of SEQ ID NO: 276.

[0257] In one embodiment the CD3 antigen binding moiety comprises a heavy chain variable region sequence that is at least about 95%, 96%, 97%, 98%, 99% or 100% identical to an amino acid sequence selected from the group of: SEQ ID NO: 269, SEQ ID NO: 298 and SEQ ID NO: 299, and a light chain variable region sequence that is at least about 95%, 96%, 97%, 98%, 99% or 100% identical to an amino acid sequence selected from the group of: SEQ ID NO: 273 and SEQ ID NO: 297.

[0258] In one embodiment the CD3 antigen binding moiety comprises a heavy chain variable region comprising an amino acid sequence selected from the group of: SEQ ID NO: 269, SEQ ID NO: 298 and SEQ ID NO: 299 and a light chain variable region comprising an amino acid sequence selected from the group of: SEQ ID NO: 273 and SEQ ID NO: 297.

[0259] In one embodiment the CD3 antigen binding moiety comprises heavy chain variable region comprising the amino acid sequence of SEQ ID NO: 269 and a light chain variable region comprising the amino acid sequence of SEQ ID NO: 273.

[0260] In one embodiment the CD3 antigen binding moiety comprises the heavy chain variable region sequence of SEQ ID NO: 269 and the light chain variable region sequence of SEQ ID NO: 273.

[0261] In one embodiment the CD3 antigen binding moiety comprises a heavy chain variable region sequence that is at least about 95%, 96%, 97%, 98%, 99% or 100% identical to SEQ ID NO: 269 and a light chain variable region sequence that is at least about 95%, 96%, 97%, 98%, 99% or 100% identical to SEQ ID NO: 273.

### Target Cell Antigen Binding Moiety

[0262] The T cell activating bispecific antigen binding molecule of the invention comprises at least one antigen binding moiety capable of binding to a target cell antigen (also referred to herein as an “target cell antigen binding moiety”). In certain embodiments, the T cell activating bispecific antigen binding molecule comprises two antigen binding moieties capable of binding to a target cell antigen. In a particular such embodiment, each of these antigen binding moieties specifically binds to the same antigenic determinant. In one embodiment, the T cell activating bispecific antigen binding molecule comprises an immunoglobulin molecule capable of specific binding to a target cell antigen. In one embodiment the T cell activating bispecific antigen binding molecule comprises not more than two antigen binding moieties capable of binding to a target cell antigen.

[0263] The target cell antigen binding moiety is generally a Fab molecule that binds to a specific antigenic determinant and is able to direct the T cell activating bispecific antigen binding molecule to a target site, for example to a specific type of tumor cell that bears the antigenic determinant.

[0264] In certain embodiments the target cell antigen binding moiety is directed to an antigen associated with a pathological condition, such as an antigen presented on a tumor cell or on a virus-infected cell. Suitable antigens are cell surface antigens, for example, but not limited to, cell surface receptors. In particular embodiments the antigen is a human antigen. In a specific embodiment the target cell antigen is selected from the group of Fibroblast Activation Protein (FAP), Melanoma-associated Chondroitin Sulfate Proteoglycan (MCSP), Epidermal Growth Factor Receptor (EGFR), Carcinoembryonic Antigen (CEA), CD19, CD20 and CD33.

[0265] In particular embodiments the T cell activating bispecific antigen binding molecule comprises at least one antigen binding moiety that is specific for Melanoma-associated Chondroitin Sulfate Proteoglycan (MCSP). In one embodiment the T cell activating bispecific antigen binding molecule comprises at least one, typically two or more antigen binding moieties that can compete with monoclonal antibody LC007 (see SEQ ID NOs 75 and 83, and European patent application no. EP 11178393.2, incorporated herein by reference in its entirety) for binding to an epitope of MCSP. In one embodiment, the antigen binding moiety that is specific for MCSP comprises the heavy chain CDR1 of SEQ ID NO: 69, the heavy chain CDR2 of SEQ ID NO: 71, the heavy chain CDR3 of SEQ ID NO: 73, the light chain CDR1 of SEQ ID NO: 77, the light chain CDR2 of SEQ ID NO: 79, and the light chain CDR3 of SEQ ID NO: 81. In a further embodiment, the antigen binding moiety that is specific for MCSP comprises a heavy chain variable region sequence that is at least about 80%, 85%, 90%, 95%, 96%, 97%, 98%, 99% or 100% identical to SEQ ID NO: 75 and a light chain variable region sequence that is at least about 80%, 85%, 90%, 95%, 96%, 97%, 98%, 99% or 100% identical to SEQ ID NO: 83, or variants thereof that retain functionality. In particular embodiments the T cell activating bispecific antigen binding molecule comprises at least one, typically two or more antigen binding moieties that can compete with monoclonal antibody M4-3 ML2 (see SEQ ID NOs 239 and 247, and European patent application no. EP 11178393.2, incorporated herein by reference in its entirety) for binding to an epitope of MCSP. In one embodiment, the antigen binding moiety that is specific for MCSP binds to the same epitope of MCSP as monoclonal antibody M4-3 ML2. In one embodiment, the antigen binding moiety that is specific for MCSP comprises the heavy chain CDR1 of SEQ ID NO: 233, the heavy chain CDR2 of SEQ ID NO: 235, the heavy chain CDR3 of SEQ ID NO: 237, the light chain CDR1 of SEQ ID NO: 241, the light chain CDR2 of SEQ ID NO: 243, and the light chain CDR3 of SEQ ID NO: 245. In a further embodiment, the antigen binding moiety that is specific for MCSP comprises a heavy chain variable region sequence that is at least about 80%, 85%, 90%, 95%, 96%, 97%, 98%, 99% or 100%, particularly about 98%, 99% or 100%, identical to SEQ ID NO: 239 and a light chain variable region sequence that is at least about 80%, 85%, 90%, 95%, 96%, 97%, 98%, 99% or 100%, particularly about 98%, 99% or 100%, identical to SEQ ID NO: 247, or variants thereof that retain functionality. In one embodiment, the antigen binding moiety that is specific for MCSP comprises the heavy and light chain variable region sequences of an affinity matured version of monoclonal antibody M4-3 ML2 (SEQ ID NO: 239 and 247). In one embodiment, the antigen binding moiety that is specific for MCSP binds to MCSP with a K_{D} of ≦5×10⁻⁹M, ≦2×10⁻⁹M, ≦1×10⁻⁹M, ≦5×10⁻¹° M, ≦2×10⁻⁹M, ≦1×10⁻¹⁰ M, ≦5×10⁻¹¹ M, ≦1×10⁻¹¹ M, ≦5×10⁻¹² M, ≦1×10⁻¹² M, or less. In one embodiment, the antigen binding moiety that is specific for MCSP has an increased affinity of at least 1.5-fold, 2-fold, 2.5-fold, 3-fold, 4-fold, 5-fold, 10-fold, 20-fold or greater as compared to the anti-MCSP antibody M4-3/ML2.

[0266] In one embodiment, the antigen binding moiety that is specific for MCSP comprises the heavy chain variable region sequence of SEQ ID NO: 239 with one, two, three, four, five, six or seven, particularly two, three, four or five, amino acid substitutions; and the light chain variable region sequence of SEQ ID NO: 247 with one, two, three, four, five, six or seven, particularly two, three, four or five, amino acid substitutions. Any amino acid residue within the variable region sequences may be substituted by a different amino acid, including amino acid residues within the CDR regions, provided that binding to MCSP, particularly human MCSP, is preserved. Preferred variants are those having a binding affinity for MCSP at least equal (or stronger) to the binding affinity of the antigen binding moiety comprising the unsubstituted variable region sequences.

[0267] In one embodiment the T cell activating bispecific antigen binding molecule comprises the polypeptide sequence of SEQ ID NO: 1, the polypeptide sequence of SEQ ID NO: 3 and the polypeptide sequence of SEQ ID NO: 5, or variants thereof that retain functionality. In a further embodiment the T cell activating bispecific antigen binding molecule comprises the polypeptide sequence of SEQ ID NO: 7, the polypeptide sequence of SEQ ID NO: 9 and the polypeptide sequence of SEQ ID NO: 11, or variants thereof that retain functionality. In yet another embodiment the T cell activating bispecific antigen binding molecule comprises the polypeptide sequence of SEQ ID NO: 13, the polypeptide sequence of SEQ ID NO: 15 and the polypeptide sequence of SEQ ID NO: 5, or variants thereof that retain functionality. In yet another embodiment the T cell activating bispecific antigen binding molecule comprises the polypeptide sequence of SEQ ID NO: 17, the polypeptide sequence of SEQ ID NO: 19 and the polypeptide sequence of SEQ ID NO: 5, or variants thereof that retain functionality. In another embodiment the T cell activating bispecific antigen binding molecule comprises the polypeptide sequence of SEQ ID NO: 21, the polypeptide sequence of SEQ ID NO: 23 and the polypeptide sequence of SEQ ID NO: 5, or variants thereof that retain functionality. In still another embodiment the T cell activating bispecific antigen binding molecule comprises the polypeptide sequence of SEQ ID NO: 25, the polypeptide sequence of SEQ ID NO: 27 and the polypeptide sequence of SEQ ID NO: 5, or variants thereof that retain functionality. In another embodiment the T cell activating bispecific antigen binding molecule comprises the polypeptide sequence of SEQ ID NO: 29, the polypeptide sequence of SEQ ID NO: 31, the polypeptide sequence of SEQ ID NO: 33, and the polypeptide sequence of SEQ ID NO: 5, or variants thereof that retain functionality. In another embodiment the T cell activating bispecific antigen binding molecule comprises the polypeptide sequence of SEQ ID NO: 29, the polypeptide sequence of SEQ ID NO: 3, the polypeptide sequence of SEQ ID NO: 33, and the polypeptide sequence of SEQ ID NO: 5, or variants thereof that retain functionality. In another embodiment the T cell activating bispecific antigen binding molecule comprises the polypeptide sequence of SEQ ID NO: 35, the polypeptide sequence of SEQ ID NO: 3, the polypeptide sequence of SEQ ID NO: 37, and the polypeptide sequence of SEQ ID NO: 5, or variants thereof that retain functionality. In another embodiment the T cell activating bispecific antigen binding molecule comprises the polypeptide sequence of SEQ ID NO: 39, the polypeptide sequence of SEQ ID NO: 3, the polypeptide sequence of SEQ ID NO: 41, and the polypeptide sequence of SEQ ID NO: 5, or variants thereof that retain functionality. In yet another embodiment the T cell activating bispecific antigen binding molecule comprises the polypeptide sequence of SEQ ID NO: 29, the polypeptide sequence of SEQ ID NO: 3, the polypeptide sequence of SEQ ID NO: 5 and the polypeptide sequence of SEQ ID NO: 179, or variants thereof that retain functionality. In one embodiment the T cell activating bispecific antigen binding molecule comprises the polypeptide sequence of SEQ ID NO: 5, the polypeptide sequence of SEQ ID NO: 29, the polypeptide sequence of SEQ ID NO: 33 and the polypeptide sequence of SEQ ID NO: 181, or variants thereof that retain functionality. In one embodiment the T cell activating bispecific antigen binding molecule comprises the polypeptide sequence of SEQ ID NO: 5, the polypeptide sequence of SEQ ID NO: 23, the polypeptide sequence of SEQ ID NO: 183 and the polypeptide sequence of SEQ ID NO: 185, or variants thereof that retain functionality. In one embodiment the T cell activating bispecific antigen binding molecule comprises the polypeptide sequence of SEQ ID NO: 5, the polypeptide sequence of SEQ ID NO: 23, the polypeptide sequence of SEQ ID NO: 183 and the polypeptide sequence of SEQ ID NO: 187, or variants thereof that retain functionality. In one embodiment the T cell activating bispecific antigen binding molecule comprises the polypeptide sequence of SEQ ID NO: 33, the polypeptide sequence of SEQ ID NO: 189, the polypeptide sequence of SEQ ID NO: 191 and the polypeptide sequence of SEQ ID NO: 193, or variants thereof that retain functionality. In one embodiment the T cell activating bispecific antigen binding molecule comprises the polypeptide sequence of SEQ ID NO: 183, the polypeptide sequence of SEQ ID NO: 189, the polypeptide sequence of SEQ ID NO: 193 and the polypeptide sequence of SEQ ID NO: 195, or variants thereof that retain functionality. In one embodiment the T cell activating bispecific antigen binding molecule comprises the polypeptide sequence of SEQ ID NO: 189, the polypeptide sequence of SEQ ID NO: 193, the polypeptide sequence of SEQ ID NO: 199 and the polypeptide sequence of SEQ ID NO: 201, or variants thereof that retain functionality. In one embodiment the T cell activating bispecific antigen binding molecule comprises the polypeptide sequence of SEQ ID NO: 5, the polypeptide sequence of SEQ ID NO: 23, the polypeptide sequence of SEQ ID NO: 215 and the polypeptide sequence of SEQ ID NO: 217, or variants thereof that retain functionality. In one embodiment the T cell activating bispecific antigen binding molecule comprises the polypeptide sequence of SEQ ID NO: 5, the polypeptide sequence of SEQ ID NO: 23, the polypeptide sequence of SEQ ID NO: 215 and the polypeptide sequence of SEQ ID NO: 219, or variants thereof that retain functionality.

[0268] In one embodiment, the antigen binding moiety that is specific for MCSP comprises at least one heavy chain complementarity determining region (CDR) selected from the group consisting of SEQ ID NO: 280, SEQ ID NO: 281, SEQ ID NO: 282, SEQ ID NO: 301, SEQ ID NO: 303, SEQ ID NO: 304 and SEQ ID NO: 306 and at least one light chain CDR selected from the group of SEQ ID NO: 284, SEQ ID NO: 285, SEQ ID NO: 286, SEQ ID NO: 310, SEQ ID NO: 311, SEQ ID NO: 314, SEQ ID NO: 315, and SEQ ID NO: 316.

[0269] In one embodiment, the antigen binding moiety that is specific for MCSP comprises at least one heavy chain complementarity determining region (CDR) selected from the group consisting of SEQ ID NO: 280, SEQ ID NO: 281 and SEQ ID NO: 282 and at least one light chain CDR selected from the group of SEQ ID NO: 284, SEQ ID NO: 285 and SEQ ID NO: 286.

[0270] In one embodiment, the antigen binding moiety that is specific for MCSP comprises the heavy chain CDR1 of SEQ ID NO: 280, the heavy chain CDR2 of SEQ ID NO: 281, the heavy chain CDR3 of SEQ ID NO: 282, the light chain CDR1 of SEQ ID NO: 284, the light chain CDR2 of SEQ ID NO: 285 and the light chain CDR3 of SEQ ID NO: 286.

[0271] In a further embodiment, the antigen binding moiety that is specific for MCSP comprises a heavy chain variable region sequence that is at least about 95%, 96%, 97%, 98%, 99% or 100% identical to an amino acid sequence selected from the group of SEQ ID NO: 279, SEQ ID NO: 300, SEQ ID NO: 302, SEQ ID NO: 305 and SEQ ID NO: 307 and a light chain variable region sequence that is at least about 95%, 96%, 97%, 98%, 99% or 100% identical to an amino acid sequence selected from the group of SEQ ID NO: 283, SEQ ID NO: 309, SEQ ID NO: 312, SEQ ID NO: 313 and SEQ ID NO: 317.

[0272] In a further embodiment, the antigen binding moiety that is specific for MCSP comprises a heavy chain variable region comprising an amino acid sequence selected from the group of SEQ ID NO: 279, SEQ ID NO: 300, SEQ ID NO: 302, SEQ ID NO: 305 and SEQ ID NO: 307 and a light chain variable region comprising an amino acid sequence selected from the group of SEQ ID NO: 283, SEQ ID NO: 309, SEQ ID NO: 312, SEQ ID NO: 313 and SEQ ID NO: 317.

[0273] In one embodiment, the antigen binding moiety that is specific for MCSP comprises a heavy chain variable region comprising the amino acid sequence of SEQ ID NO: 279 and a light chain variable region comprising the amino acid sequence of SEQ ID NO: 283.

[0274] In one embodiment, the antigen binding moiety that is specific for MCSP comprises the heavy chain variable region sequence of SEQ ID NO: 279 and the light chain variable region sequence of SEQ ID NO: 283.

[0275] In a further embodiment, the antigen binding moiety that is specific for MCSP comprises a heavy chain variable region sequence that is at least about 95%, 96%, 97%, 98%, 99% or 100% identical to the amino acid sequence of SEQ ID NO: 279 and a light chain variable region sequence that is at least about 95%, 96%, 97%, 98%, 99% or 100% identical to the amino acid sequence of SEQ ID NO: 283, or variants thereof that retain functionality.

[0276] In one embodiment the T cell activating bispecific antigen binding molecule comprises a polypeptide sequence that is at least about 95%, 96%, 97%, 98%, 99% or 100% identical to SEQ ID NO: 278, a polypeptide sequence that is at least about 95%, 96%, 97%, 98%, 99% or 100% identical to SEQ ID NO: 319, a polypeptide sequence that is at least about 95%, 96%, 97%, 98%, 99% or 100% identical to SEQ ID NO: 320, and a polypeptide sequence that is at least about 95%, 96%, 97%, 98%, 99% or 100% identical to SEQ ID NO: 321.

[0277] In one embodiment the T cell activating bispecific antigen binding molecule comprises a polypeptide sequence that is at least about 95%, 96%, 97%, 98%, 99% or 100% identical to SEQ ID NO: 278, a polypeptide sequence that is at least about 95%, 96%, 97%, 98%, 99% or 100% identical to SEQ ID NO: 319, a polypeptide sequence that is at least about 95%, 96%, 97%, 98%, 99% or 100% identical to SEQ ID NO: 369, and a polypeptide sequence that is at least about 95%, 96%, 97%, 98%, 99% or 100% identical to SEQ ID NO: 370.

[0278] In one embodiment the T cell activating bispecific antigen binding molecule comprises a polypeptide sequence that is at least about 95%, 96%, 97%, 98%, 99% or 100% identical to SEQ ID NO: 278, a polypeptide sequence that is at least about 95%, 96%, 97%, 98%, 99% or 100% identical to SEQ ID NO: 319, a polypeptide sequence that is at least about 95%, 96%, 97%, 98%, 99% or 100% identical to SEQ ID NO: 371, and a polypeptide sequence that is at least about 95%, 96%, 97%, 98%, 99% or 100% identical to SEQ ID NO: 372.

[0279] In a specific embodiment the T cell activating bispecific antigen binding molecule comprises a polypeptide sequence encoded by a polynucleotide sequence that is at least about 80%, 85%, 90%, 95%, 96%, 97%, 98%, 99% or 100% identical to a sequence selected from the group of SEQ ID NO: 70, SEQ ID NO: 72, SEQ ID NO: 74, SEQ ID NO: 76, SEQ ID NO: 78, SEQ ID NO: 80, SEQ ID NO: 82, SEQ ID NO: 84, SEQ ID NO: 234, SEQ ID NO: 236, SEQ ID NO: 238, SEQ ID NO: 240, SEQ ID NO: 242, SEQ ID NO: 244, SEQ ID NO: 246, SEQ ID NO: 248, SEQ ID NO: 2, SEQ ID NO: 4, SEQ ID NO: 6, SEQ ID NO: 8, SEQ ID NO: 10, SEQ ID NO: 12, SEQ ID NO: 14, SEQ ID NO: 16, SEQ ID NO: 18, SEQ ID NO: 20, SEQ ID NO: 22, SEQ ID NO: 24, SEQ ID NO: 26, SEQ ID NO: 28, SEQ ID NO: 30, SEQ ID NO: 32, SEQ ID NO: 34, SEQ ID NO: 36, SEQ ID NO: 38, SEQ ID NO: 40, SEQ ID NO: 42, SEQ ID NO: 180, SEQ ID NO: 182, SEQ ID NO: 184, SEQ ID NO: 186, SEQ ID NO: 188, SEQ ID NO: 190, SEQ ID NO: 192, SEQ ID NO: 194, SEQ ID NO: 196, SEQ ID NO: 200, SEQ ID NO: 202, SEQ ID NO: 216, SEQ ID NO: 218 and SEQ ID NO: 220.

[0280] In one embodiment the T cell activating bispecific antigen binding molecule comprises at least one antigen binding moiety that is specific for Epidermal Growth Factor Receptor (EGFR). In another embodiment the T cell activating bispecific antigen binding molecule comprises at least one, typically two or more antigen binding moieties that can compete with monoclonal antibody GA201 for binding to an epitope of EGFR. See PCT publication WO 2006/082515, incorporated herein by reference in its entirety. In one embodiment, the antigen binding moiety that is specific for EGFR comprises the heavy chain CDR1 of SEQ ID NO: 85, the heavy chain CDR2 of SEQ ID NO: 87, the heavy chain CDR3 of SEQ ID NO: 89, the light chain CDR1 of SEQ ID NO: 93, the light chain CDR2 of SEQ ID NO: 95, and the light chain CDR3 of SEQ ID NO: 97. In a further embodiment, the antigen binding moiety that is specific for EGFR comprises a heavy chain variable region sequence that is at least about 80%, 85%, 90%, 95%, 96%, 97%, 98%, 99% or 100% identical to SEQ ID NO: 91 and a light chain variable region sequence that is at least about 80%, 85%, 90%, 95%, 96%, 97%, 98%, 99% or 100% identical to SEQ ID NO: 99, or variants thereof that retain functionality.

[0281] In yet another embodiment the T cell activating bispecific antigen binding molecule comprises the polypeptide sequence of SEQ ID NO: 43, the polypeptide sequence of SEQ ID NO: 45 and the polypeptide sequence of SEQ ID NO: 47, or variants thereof that retain functionality. In a further embodiment the T cell activating bispecific antigen binding molecule comprises the polypeptide sequence of SEQ ID NO: 49, the polypeptide sequence of SEQ ID NO: 51 and the polypeptide sequence of SEQ ID NO: 11, or variants thereof that retain functionality. In yet another embodiment the T cell activating bispecific antigen binding molecule comprises the polypeptide sequence of SEQ ID NO: 53, the polypeptide sequence of SEQ ID NO: 45 and the polypeptide sequence of SEQ ID NO: 47, or variants thereof that retain functionality.

[0282] In a specific embodiment the T cell activating bispecific antigen binding molecule comprises a polypeptide sequence encoded by a polynucleotide sequence that is at least about 80%, 85%, 90%, 95%, 96%, 97%, 98%, 99% or 100% identical to a sequence selected from the group of SEQ ID NO: 86, SEQ ID NO: 88, SEQ ID NO: 90, SEQ ID NO: 92, SEQ ID NO: 94, SEQ ID NO: 96, SEQ ID NO: 98, SEQ ID NO: 100, SEQ ID NO: 44, SEQ ID NO: 46, SEQ ID NO: 48, SEQ ID NO: 50, SEQ ID NO: 52, SEQ ID NO: 54 and SEQ ID NO: 12.

[0283] In one embodiment the T cell activating bispecific antigen binding molecule comprises at least one antigen binding moiety that is specific for Fibroblast Activation Protein (FAP). In another embodiment the T cell activating bispecific antigen binding molecule comprises at least one, typically two or more antigen binding moieties that can compete with monoclonal antibody 3F2 for binding to an epitope of FAP. See PCT publication WO 2012/020006, incorporated herein by reference in its entirety. In one embodiment, the antigen binding moiety that is specific for FAP comprises the heavy chain CDR1 of SEQ ID NO: 101, the heavy chain CDR2 of SEQ ID NO: 103, the heavy chain CDR3 of SEQ ID NO: 105, the light chain CDR1 of SEQ ID NO: 109, the light chain CDR2 of SEQ ID NO: 111, and the light chain CDR3 of SEQ ID NO: 113. In a further embodiment, the antigen binding moiety that is specific for FAP comprises a heavy chain variable region sequence that is at least about 80%, 85%, 90%, 95%, 96%, 97%, 98%, 99% or 100% identical to SEQ ID NO: 107 and a light chain variable region sequence that is at least about 80%, 85%, 90%, 95%, 96%, 97%, 98%, 99% or 100% identical to SEQ ID NO: 115, or variants thereof that retain functionality.

[0284] In yet another embodiment the T cell activating bispecific antigen binding molecule comprises the polypeptide sequence of SEQ ID NO: 55, the polypeptide sequence of SEQ ID NO: 51 and the polypeptide sequence of SEQ ID NO: 11, or variants thereof that retain functionality. In a further embodiment the T cell activating bispecific antigen binding molecule comprises the polypeptide sequence of SEQ ID NO: 57, the polypeptide sequence of SEQ ID NO: 59 and the polypeptide sequence of SEQ ID NO: 61, or variants thereof that retain functionality.

[0285] In a specific embodiment the T cell activating bispecific antigen binding molecule comprises a polypeptide sequence encoded by a polynucleotide sequence that is at least about 80%, 85%, 90%, 95%, 96%, 97%, 98%, 99% or 100% identical to a sequence selected from the group of SEQ ID NO: 102, SEQ ID NO: 104, SEQ ID NO: 106, SEQ ID NO: 108, SEQ ID NO: 110, SEQ ID NO: 112, SEQ ID NO: 114, SEQ ID NO: 116, SEQ ID NO: 56, SEQ ID NO: 58, SEQ ID NO: 60, SEQ ID NO: 62, SEQ ID NO: 52 and SEQ ID NO: 12.

[0286] In particular embodiments the T cell activating bispecific antigen binding molecule comprises at least one antigen binding moiety that is specific for Carcinoembryonic Antigen (CEA). In one embodiment the T cell activating bispecific antigen binding molecule comprises at least one, typically two or more antigen binding moieties that can compete with monoclonal antibody BW431/26 (described in European patent no. EP 160 897, and Bosslet et al., Int J Cancer 36, 75-84 (1985)) for binding to an epitope of CEA. In one embodiment the T cell activating bispecific antigen binding molecule comprises at least one, typically two or more antigen binding moieties that can compete with monoclonal antibody CH1A1A (see SEQ ID NOs 123 and 131) for binding to an epitope of CEA. See PCT patent publication number WO 2011/023787, incorporated herein by reference in its entirety. In one embodiment, the antigen binding moiety that is specific for CEA binds to the same epitope of CEA as monoclonal antibody CH1A1A. In one embodiment, the antigen binding moiety that is specific for CEA comprises the heavy chain CDR1 of SEQ ID NO: 117, the heavy chain CDR2 of SEQ ID NO: 119, the heavy chain CDR3 of SEQ ID NO: 121, the light chain CDR1 of SEQ ID NO: 125, the light chain CDR2 of SEQ ID NO: 127, and the light chain CDR3 of SEQ ID NO: 129. In a further embodiment, the antigen binding moiety that is specific for CEA comprises a heavy chain variable region sequence that is at least about 80%, 85%, 90%, 95%, 96%, 97%, 98%, 99% or 100%, particularly about 98%, 99% or 100%, identical to SEQ ID NO: 123 and a light chain variable region sequence that is at least about 80%, 85%, 90%, 95%, 96%, 97%, 98%, 99% or 100%, particularly about 98%, 99% or 100%, identical to SEQ ID NO: 131, or variants thereof that retain functionality. In one embodiment, the antigen binding moiety that is specific for CEA comprises the heavy and light chain variable region sequences of an affinity matured version of monoclonal antibody CH1A1A. In one embodiment, the antigen binding moiety that is specific for CEA comprises the heavy chain variable region sequence of SEQ ID NO: 123 with one, two, three, four, five, six or seven, particularly two, three, four or five, amino acid substitutions; and the light chain variable region sequence of SEQ ID NO: 131 with one, two, three, four, five, six or seven, particularly two, three, four or five, amino acid substitutions. Any amino acid residue within the variable region sequences may be substituted by a different amino acid, including amino acid residues within the CDR regions, provided that binding to CEA, particularly human CEA, is preserved. Preferred variants are those having a binding affinity for CEA at least equal (or stronger) to the binding affinity of the antigen binding moiety comprising the unsubstituted variable region sequences.

[0287] In one embodiment the T cell activating bispecific antigen binding molecule comprises the polypeptide sequence of SEQ ID NO: 63, the polypeptide sequence of SEQ ID NO: 65, the polypeptide sequence of SEQ ID NO: 67 and the polypeptide sequence of SEQ ID NO: 33, or variants thereof that retain functionality. In one embodiment the T cell activating bispecific antigen binding molecule comprises the polypeptide sequence of SEQ ID NO: 65, the polypeptide sequence of SEQ ID NO: 67, the polypeptide sequence of SEQ ID NO: 183 and the polypeptide sequence of SEQ ID NO: 197, or variants thereof that retain functionality. In one embodiment the T cell activating bispecific antigen binding molecule comprises the polypeptide sequence of SEQ ID NO: 183, the polypeptide sequence of SEQ ID NO: 203, the polypeptide sequence of SEQ ID NO: 205 and the polypeptide sequence of SEQ ID NO: 207, or variants thereof that retain functionality. In one embodiment the T cell activating bispecific antigen binding molecule comprises the polypeptide sequence of SEQ ID NO: 183, the polypeptide sequence of SEQ ID NO: 209, the polypeptide sequence of SEQ ID NO: 211 and the polypeptide sequence of SEQ ID NO: 213, or variants thereof that retain functionality.

[0288] In a specific embodiment the T cell activating bispecific antigen binding molecule comprises a polypeptide sequence encoded by a polynucleotide sequence that is at least about 80%, 85%, 90%, 95%, 96%, 97%, 98%, 99% or 100% identical to a sequence selected from the group of SEQ ID NO: 118, SEQ ID NO: 120, SEQ ID NO: 122, SEQ ID NO: 124, SEQ ID NO: 126, SEQ ID NO: 128, SEQ ID NO: 130, SEQ ID NO: 132, SEQ ID NO: 64, SEQ ID NO: 66, SEQ ID NO: 68, SEQ ID NO: 34, SEQ ID NO: 184, SEQ ID NO: 198, SEQ ID NO: 204, SEQ ID NO: 206, SEQ ID NO: 208, SEQ ID NO: 210, SEQ ID NO: 212 and SEQ ID NO: 214.

[0289] In one embodiment, the antigen binding moiety that is specific for CEA comprises at least one heavy chain complementarity determining region (CDR) selected from the group consisting of SEQ ID NO: 290, SEQ ID NO: 291 and SEQ ID NO: 292 and at least one light chain CDR selected from the group of SEQ ID NO: 294, SEQ ID NO: 295 and SEQ ID NO: 296.

[0290] In one embodiment, the antigen binding moiety that is specific for CEA comprises the heavy chain CDR1 of SEQ ID NO: 290, the heavy chain CDR2 of SEQ ID NO: 291, the heavy chain CDR3 of SEQ ID NO: 292, the light chain CDR1 of SEQ ID NO: 294, the light chain CDR2 of SEQ ID NO: 295 and the light chain CDR3 of SEQ ID NO: 296.

[0291] In one embodiment, the antigen binding moiety that is specific for CEA comprises a heavy chain variable region comprising the amino acid sequence of SEQ ID NO: 289 and a light chain variable region comprising the amino acid sequence of SEQ ID NO: 293.

[0292] In one embodiment, the antigen binding moiety that is specific for CEA comprises the heavy chain variable region sequence of SEQ ID NO: 289 and the light chain variable region sequence of SEQ ID NO: 293.

[0293] In a further embodiment, the antigen binding moiety that is specific for CEA comprises a heavy chain variable region sequence that is at least about 95%, 96%, 97%, 98%, 99% or 100% identical to the amino acid sequence of SEQ ID NO: 289 and a light chain variable region sequence that is at least about 95%, 96%, 97%, 98%, 99% or 100% identical to the amino acid sequence of SEQ ID NO: 293, or variants thereof that retain functionality.

[0294] In one embodiment the T cell activating bispecific antigen binding molecule comprises a polypeptide sequence that is at least about 95%, 96%, 97%, 98%, 99% or 100% identical to SEQ ID NO: 288, a polypeptide sequence that is at least about 95%, 96%, 97%, 98%, 99% or 100% identical to SEQ ID NO: 322, a polypeptide sequence that is at least about 95%, 96%, 97%, 98%, 99% or 100% identical to SEQ ID NO: 323, and a polypeptide sequence that is at least about 95%, 96%, 97%, 98%, 99% or 100% identical to SEQ ID NO: 324.

[0295] In one embodiment the T cell activating bispecific antigen binding molecule comprises at least one antigen binding moiety that is specific for CD33. In one embodiment, the antigen binding moiety that is specific for CD33 comprises the heavy chain CDR1 of SEQ ID NO: 133, the heavy chain CDR2 of SEQ ID NO: 135, the heavy chain CDR3 of SEQ ID NO: 137, the light chain CDR1 of SEQ ID NO: 141, the light chain CDR2 of SEQ ID NO: 143, and the light chain CDR3 of SEQ ID NO: 145. In a further embodiment, the antigen binding moiety that is specific for CD33 comprises a heavy chain variable region sequence that is at least about 80%, 85%, 90%, 95%, 96%, 97%, 98%, 99% or 100% identical to SEQ ID NO: 139 and a light chain variable region sequence that is at least about 80%, 85%, 90%, 95%, 96%, 97%, 98%, 99% or 100% identical to SEQ ID NO: 147, or variants thereof that retain functionality.

[0296] In one embodiment the T cell activating bispecific antigen binding molecule comprises the polypeptide sequence of SEQ ID NO: 33, the polypeptide sequence of SEQ ID NO: 213, the polypeptide sequence of SEQ ID NO: 221 and the polypeptide sequence of SEQ ID NO: 223, or variants thereof that retain functionality. In one embodiment the T cell activating bispecific antigen binding molecule comprises the polypeptide sequence of SEQ ID NO: 33, the polypeptide sequence of SEQ ID NO: 221, the polypeptide sequence of SEQ ID NO: 223 and the polypeptide sequence of SEQ ID NO: 225, or variants thereof that retain functionality.

[0297] In a specific embodiment the T cell activating bispecific antigen binding molecule comprises a polypeptide sequence encoded by a polynucleotide sequence that is at least about 80%, 85%, 90%, 95%, 96%, 97%, 98%, 99% or 100% identical to a sequence selected from the group of SEQ ID NO: 134, SEQ ID NO: 136, SEQ ID NO: 138, SEQ ID NO: 140, SEQ ID NO: 142, SEQ ID NO: 144, SEQ ID NO: 146, SEQ ID NO: 148, SEQ ID NO: 34, SEQ ID NO: 214, SEQ ID NO: 222, SEQ ID NO: 224 and SEQ ID NO: 226.

### Polynucleotides

[0298] The invention further provides isolated polynucleotides encoding a T cell activating bispecific antigen binding molecule as described herein or a fragment thereof. In some embodiments, said fragment is an antigen binding fragment.

[0299] Polynucleotides of the invention include those that are at least about 80%, 85%, 90%, 95%, 96%, 97%, 98%, 99%, or 100% identical to the sequences set forth in SEQ ID NOs 2, 4, 6, 8, 10, 12, 14, 16, 18, 20, 22, 24, 26, 28, 30, 32, 34, 36, 38, 40, 42, 44, 46, 48, 50, 52, 54, 56, 58, 60, 62, 64, 66, 68, 70, 72, 74, 76, 78, 80, 82, 84, 86, 88, 90, 92, 94, 96, 98, 100, 102, 104, 106, 108, 110, 112, 114, 116, 118, 120, 122, 124, 126, 128, 130, 132, 134, 136, 138, 140, 142, 144, 146, 148, 164, 166, 168, 170, 172, 174, 176, 178, 180, 182, 184, 186, 188, 190, 192, 194, 196, 198, 200, 202, 204, 206, 208, 210, 212, 214, 216, 218, 220, 222, 224, 226, 228, 230, 232, 234, 236, 238, 240, 242, 244, 246, 248, 250, 252, 254, 256, 258, 260, 262, 264, 329, 330, 331, 332, 333, 334, 335, 336, 337, 338, 339, 340, 341, 342, 343, 344, 345, 346, 347, 348, 349, 350, 351, 352, 353, 354, 355, 356, 357, 358, 359, 360, 361, 362, 363, 364, 373, and 374 including functional fragments or variants thereof.

[0300] The polynucleotides encoding T cell activating bispecific antigen binding molecules of the invention may be expressed as a single polynucleotide that encodes the entire T cell activating bispecific antigen binding molecule or as multiple (e.g., two or more) polynucleotides that are co-expressed. Polypeptides encoded by polynucleotides that are co-expressed may associate through, e.g., disulfide bonds or other means to form a functional T cell activating bispecific antigen binding molecule. For example, the light chain portion of an antigen binding moiety may be encoded by a separate polynucleotide from the portion of the T cell activating bispecific antigen binding molecule comprising the heavy chain portion of the antigen binding moiety, an Fc domain subunit and optionally (part of) another antigen binding moiety. When co-expressed, the heavy chain polypeptides will associate with the light chain polypeptides to form the antigen binding moiety. In another example, the portion of the T cell activating bispecific antigen binding molecule comprising one of the two Fc domain subunits and optionally (part of) one or more antigen binding moieties could be encoded by a separate polynucleotide from the portion of the T cell activating bispecific antigen binding molecule comprising the other of the two Fc domain subunits and optionally (part of) an antigen binding moiety. When co-expressed, the Fc domain subunits will associate to form the Fc domain.

[0301] In certain embodiments, an isolated polynucleotide of the invention encodes a fragment of a T cell activating bispecific antigen binding molecule comprising a first and a second antigen binding moiety, and an Fc domain consisting of two subunits, wherein the first antigen binding moiety is a single chain Fab molecule. In one embodiment, an isolated polynucleotide of the invention encodes the first antigen binding moiety and a subunit of the Fc domain. In a more specific embodiment the isolated polynucleotide encodes a polypeptide wherein a single chain Fab molecule shares a carboxy-terminal peptide bond with an Fc domain subunit. In another embodiment, an isolated polynucleotide of the invention encodes the heavy chain of the second antigen binding moiety and a subunit of the Fc domain. In a more specific embodiment the isolated polynucleotide encodes a polypeptide wherein a Fab heavy chain shares a carboxy terminal peptide bond with an Fc domain subunit. In yet another embodiment, an isolated polynucleotide of the invention encodes the first antigen binding moiety, the heavy chain of the second antigen binding moiety and a subunit of the Fc domain. In a more specific embodiment, the isolated polynucleotide encodes a polypeptide wherein a single chain Fab molecule shares a carboxy-terminal peptide bond with a Fab heavy chain, which in turn shares a carboxy-terminal peptide bond with an Fc domain subunit.

[0302] In certain embodiments, an isolated polynucleotide of the invention encodes a fragment of a T cell activating bispecific antigen binding molecule comprising a first and a second antigen binding moiety, and an Fc domain consisting of two subunits, wherein the first antigen binding moiety is a crossover Fab molecule. In one embodiment, an isolated polynucleotide of the invention encodes the heavy chain of the first antigen binding moiety and a subunit of the Fc domain. In a more specific embodiment the isolated polynucleotide encodes a polypeptide wherein Fab light chain variable region shares a carboxy terminal peptide bond with a Fab heavy chain constant region, which in turn shares a carboxy-terminal peptide bond with an Fc domain subunit. In another specific embodiment the isolated polynucleotide encodes a polypeptide wherein Fab heavy chain variable region shares a carboxy terminal peptide bond with a Fab light chain constant region, which in turn shares a carboxy-terminal peptide bond with an Fc domain subunit. In another embodiment, an isolated polynucleotide of the invention encodes the heavy chain of the second antigen binding moiety and a subunit of the Fc domain. In a more specific embodiment the isolated polynucleotide encodes a polypeptide wherein a Fab heavy chain shares a carboxy terminal peptide bond with an Fc domain subunit. In yet another embodiment, an isolated polynucleotide of the invention encodes the heavy chain of the first antigen binding moiety, the heavy chain of the second antigen binding moiety and a subunit of the Fc domain. In a more specific embodiment, the isolated polynucleotide encodes a polypeptide wherein a Fab light chain variable region shares a carboxy-terminal peptide bond with a Fab heavy chain constant region, which in turn shares a carboxy-terminal peptide bond with a Fab heavy chain, which in turn shares a carboxy-terminal peptide bond with an Fc domain subunit. In another specific embodiment, the isolated polynucleotide encodes a polypeptide wherein a Fab heavy chain variable region shares a carboxy-terminal peptide bond with a Fab light chain constant region, which in turn shares a carboxy-terminal peptide bond with a Fab heavy chain, which in turn shares a carboxy-terminal peptide bond with an Fc domain subunit. In yet another specific embodiment the isolated polynucleotide encodes a polypeptide wherein a Fab heavy chain shares a carboxy-terminal peptide bond with a Fab light chain variable region, which in turn shares a carboxy-terminal peptide bond with a Fab heavy chain constant region, which in turn shares a carboxy-terminal peptide bond with an Fc domain subunit. In still another specific embodiment the isolated polynucleotide encodes a polypeptide wherein a Fab heavy chain shares a carboxy-terminal peptide bond with a Fab heavy chain variable region, which in turn shares a carboxy-terminal peptide bond with a Fab light chain constant region, which in turn shares a carboxy-terminal peptide bond with an Fc domain subunit.

[0303] In further embodiments, an isolated polynucleotide of the invention encodes the heavy chain of a third antigen binding moiety and a subunit of the Fc domain. In a more specific embodiment the isolated polynucleotide encodes a polypeptide wherein a Fab heavy chain shares a carboxy terminal peptide bond with an Fc domain subunit.

[0304] In further embodiments, an isolated polynucleotide of the invention encodes the light chain of an antigen binding moiety. In some embodiments, the isolated polynucleotide encodes a polypeptide wherein a Fab light chain variable region shares a carboxy-terminal peptide bond with a Fab heavy chain constant region. In other embodiments, the isolated polynucleotide encodes a polypeptide wherein a Fab heavy chain variable region shares a carboxy-terminal peptide bond with a Fab light chain constant region. In still other embodiments, an isolated polynucleotide of the invention encodes the light chain of the first antigen binding moiety and the light chain of the second antigen binding moiety. In a more specific embodiment, the isolated polynucleotide encodes a polypeptide wherein a Fab heavy chain variable region shares a carboxy-terminal peptide bond with a Fab light chain constant region, which in turn shares a carboxy-terminal peptide bond with a Fab light chain. In another specific embodiment the isolated polynucleotide encodes a polypeptide wherein a Fab light chain shares a carboxy-terminal peptide bond with a Fab heavy chain variable region, which in turn shares a carboxy-terminal peptide bond with a Fab light chain constant region. In yet another specific embodiment, the isolated polynucleotide encodes a polypeptide wherein a Fab light chain variable region shares a carboxy-terminal peptide bond with a Fab heavy chain constant region, which in turn shares a carboxy-terminal peptide bond with a Fab light chain. In yet another specific embodiment the isolated polynucleotide encodes a polypeptide wherein a Fab light chain shares a carboxy-terminal peptide bond with a Fab light chain variable region, which in turn shares a carboxy-terminal peptide bond with a Fab heavy chain constant region.

[0305] In another embodiment, the present invention is directed to an isolated polynucleotide encoding a T cell activating bispecific antigen binding molecule of the invention or a fragment thereof, wherein the polynucleotide comprises a sequence that encodes a variable region sequence as shown in SEQ ID NOs 75, 83, 91, 99, 107, 115, 123, 131, 139, 147, 169, 177, 239, 247, 255 and 263. In another embodiment, the present invention is directed to an isolated polynucleotide encoding a T cell activating bispecific antigen binding molecule or fragment thereof, wherein the polynucleotide comprises a sequence that encodes a polypeptide sequence as shown in SEQ ID NOs 1, 3, 5, 7, 9, 11, 13, 15, 17, 19, 21, 23, 25, 27, 29, 31, 33, 35, 37, 39, 41, 43, 45, 47, 49, 51, 53, 55, 57, 59, 61, 63, 65, 67, 179, 181, 183, 185, 187, 189, 191, 193, 195, 197, 199, 201, 203, 205, 207, 209, 211, 213, 215, 217, 219, 221, 223, 225, 227, 229 and 231. In another embodiment, the invention is further directed to an isolated polynucleotide encoding a T cell activating bispecific antigen binding molecule of the invention or a fragment thereof, wherein the polynucleotide comprises a sequence that is at least about 80%, 85%, 90%, 95%, 96%, 97%, 98%, or 99% identical to a nucleotide sequence shown in SEQ ID NOs 2, 4, 6, 8, 10, 12, 14, 16, 18, 20, 22, 24, 26, 28, 30, 32, 34, 36, 38, 40, 42, 44, 46, 48, 50, 52, 54, 56, 58, 60, 62, 64, 66, 68, 70, 72, 74, 76, 78, 80, 82, 84, 86, 88, 90, 92, 94, 96, 98, 100, 102, 104, 106, 108, 110, 112, 114, 116, 118, 120, 122, 124, 126, 128, 130, 132, 134, 136, 138, 140, 142, 144, 146, 148, 164, 166, 168, 170, 172, 174, 176, 178, 180, 182, 184, 186, 188, 190, 192, 194, 196, 198, 200, 202, 204, 206, 208, 210, 212, 214, 216, 218, 220, 222, 224, 226, 228, 230, 232, 234, 236, 238, 240, 242, 244, 246, 248, 250, 252, 254, 256, 258, 260, 262 or 264. In another embodiment, the invention is directed to an isolated polynucleotide encoding a T cell activating bispecific antigen binding molecule of the invention or a fragment thereof, wherein the polynucleotide comprises a nucleic acid sequence shown in SEQ ID NOs 2, 4, 6, 8, 10, 12, 14, 16, 18, 20, 22, 24, 26, 28, 30, 32, 34, 36, 38, 40, 42, 44, 46, 48, 50, 52, 54, 56, 58, 60, 62, 64, 66, 68, 70, 72, 74, 76, 78, 80, 82, 84, 86, 88, 90, 92, 94, 96, 98, 100, 102, 104, 106, 108, 110, 112, 114, 116, 118, 120, 122, 124, 126, 128, 130, 132, 134, 136, 138, 140, 142, 144, 146, 148, 164, 166, 168, 170, 172, 174, 176, 178, 180, 182, 184, 186, 188, 190, 192, 194, 196, 198, 200, 202, 204, 206, 208, 210, 212, 214, 216, 218, 220, 222, 224, 226, 228, 230, 232, 234, 236, 238, 240, 242, 244, 246, 248, 250, 252, 254, 256, 258, 260, 262 or 264. In another embodiment, the invention is directed to an isolated polynucleotide encoding a T cell activating bispecific antigen binding molecule of the invention or a fragment thereof, wherein the polynucleotide comprises a sequence that encodes a variable region sequence that is at least about 80%, 85%, 90%, 95%, 96%, 97%, 98%, or 99% identical to an amino acid sequence in SEQ ID NOs 75, 83, 91, 99, 107, 115, 123, 131, 139, 147, 169, 177, 239, 247, 255 or 263. In another embodiment, the invention is directed to an isolated polynucleotide encoding a T cell activating bispecific antigen binding molecule or fragment thereof, wherein the polynucleotide comprises a sequence that encodes a polypeptide sequence that is at least 80%, 85%, 90%, 95%, 96%, 97%, 98%, or 99% identical to an amino acid sequence in SEQ ID NOs 1, 3, 5, 7, 9, 11, 13, 15, 17, 19, 21, 23, 25, 27, 29, 31, 33, 35, 37, 39, 41, 43, 45, 47, 49, 51, 53, 55, 57, 59, 61, 63, 65, 67, 179, 181, 183, 185, 187, 189, 191, 193, 195, 197, 199, 201, 203, 205, 207, 209, 211, 213, 215, 217, 219, 221, 223, 225, 227, 229 or 231. The invention encompasses an isolated polynucleotide encoding a T cell activating bispecific antigen binding molecule of the invention or a fragment thereof, wherein the polynucleotide comprises a sequence that encodes the variable region sequence of SEQ ID NOs 75, 83, 91, 99, 107, 115, 123, 131, 139, 147, 169, 177, 239, 247, 255 or 263 with conservative amino acid substitutions.

[0306] In another embodiment, the present invention is directed to an isolated polynucleotide encoding a T cell activating bispecific antigen binding molecule of the invention or a fragment thereof, wherein the polynucleotide comprises a sequence that encodes a variable region sequence as shown in SEQ ID NOs 269, 273, 279, 283, 289, 293, 297, 298, 299, 300, 302, 305, 307, 309, 312, 313 or 317. In another embodiment, the present invention is directed to an isolated polynucleotide encoding a T cell activating bispecific antigen binding molecule or fragment thereof, wherein the polynucleotide comprises a sequence that encodes a polypeptide sequence as shown in SEQ ID NOs 288, 322, 323, 324, 278, 319, 320, 321, 369, 370, 371 or 372. In another embodiment, the invention is further directed to an isolated polynucleotide encoding a T cell activating bispecific antigen binding molecule of the invention or a fragment thereof, wherein the polynucleotide comprises a sequence that is at least about 80%, 85%, 90%, 95%, 96%, 97%, 98%, or 99% identical to a nucleotide sequence shown in SEQ ID NOs 329, 330, 331, 332, 333, 334, 335, 336, 337, 338, 339, 340, 341, 342, 343, 344, 345, 346, 347, 348, 349, 350, 351, 352, 353, 354, 355, 356, 357, 358, 359, 360, 361, 362, 364, 364, 373 or 374. In another embodiment, the invention is directed to an isolated polynucleotide encoding a T cell activating bispecific antigen binding molecule of the invention or a fragment thereof, wherein the polynucleotide comprises a nucleic acid sequence shown in SEQ ID NOs 329, 330, 331, 332, 333, 334, 335, 336, 337, 338, 339, 340, 341, 342, 343, 344, 345, 346, 347, 348, 349, 350, 351, 352, 353, 354, 355, 356, 357, 358, 359, 360, 361, 362, 363, 364, 373 or 374. In another embodiment, the invention is directed to an isolated polynucleotide encoding a T cell activating bispecific antigen binding molecule of the invention or a fragment thereof, wherein the polynucleotide comprises a sequence that encodes a variable region sequence that is at least about 80%, 85%, 90%, 95%, 96%, 97%, 98%, or 99% identical to the amino acid sequence of SEQ ID NOs 269, 273, 279, 283, 289, 293, 297, 298, 299, 300, 302, 305, 307, 309, 312, 313 or 317. In another embodiment, the invention is directed to an isolated polynucleotide encoding a T cell activating bispecific antigen binding molecule or fragment thereof, wherein the polynucleotide comprises a sequence that encodes a polypeptide sequence that is at least 80%, 85%, 90%, 95%, 96%, 97%, 98%, or 99% identical to the amino acid sequence of SEQ ID NOs 288, 322, 323, 324, 278, 319, 320, 321, 369, 370, 371 or 372.

[0307] The invention encompasses an isolated polynucleotide encoding a T cell activating bispecific antigen binding molecule of the invention or a fragment thereof, wherein the polynucleotide comprises a sequence that encodes the variable region sequence of SEQ ID NOs 269, 273, 279, 283, 289, 293, 297, 298, 299, 300, 302, 305, 307, 309, 312, 313 or 317 with conservative amino acid substitutions. The invention also encompasses an isolated polynucleotide encoding a T cell activating bispecific antigen binding molecule of the invention or fragment thereof, wherein the polynucleotide comprises a sequence that encodes the polypeptide sequence of SEQ ID NOs 288, 322, 323, 324, 278, 319, 320 or 321 with conservative amino acid substitutions.

[0308] The invention also encompasses an isolated polynucleotide encoding a T cell activating bispecific antigen binding molecule of the invention or fragment thereof, wherein the polynucleotide comprises a sequence that encodes the polypeptide sequence of SEQ ID NOs 278, 319, 369 or 370 with conservative amino acid substitutions.

[0309] The invention also encompasses an isolated polynucleotide encoding a T cell activating bispecific antigen binding molecule of the invention or fragment thereof, wherein the polynucleotide comprises a sequence that encodes the polypeptide sequence of SEQ ID NOs 278, 319, 371 or 372 with conservative amino acid substitutions.

[0310] The invention also encompasses an isolated polynucleotide encoding a T cell activating bispecific antigen binding molecule of the invention or fragment thereof, wherein the polynucleotide comprises a sequence that encodes the polypeptide sequence of SEQ ID NOs 1, 3, 5, 7, 9, 11, 13, 15, 17, 19, 21, 23, 25, 27, 29, 31, 33, 35, 37, 39, 41, 43, 45, 47, 49, 51, 53, 55, 57, 59, 61, 63, 65, 67, 179, 181, 183, 185, 187, 189, 191, 193, 195, 197, 199, 201, 203, 205, 207, 209, 211, 213, 215, 217, 219, 221, 223, 225, 227, 229, 231, 329, 330, 331, 332, 333, 334, 335, 336, 337, 338, 339, 340, 341, 342, 343, 344, 345, 346, 347, 348, 349, 350, 351, 352, 353, 354, 355, 356, 357, 358, 359, 360, 361, 362, 364, 364, 373 or 374 with conservative amino acid substitutions.

[0311] In certain embodiments the polynucleotide or nucleic acid is DNA. In other embodiments, a polynucleotide of the present invention is RNA, for example, in the form of messenger RNA (mRNA). RNA of the present invention may be single stranded or double stranded.

### Recombinant Methods

[0312] T cell activating bispecific antigen binding molecules of the invention may be obtained, for example, by solid-state peptide synthesis (e.g. Merrifield solid phase synthesis) or recombinant production. For recombinant production one or more polynucleotide encoding the T cell activating bispecific antigen binding molecule (fragment), e.g., as described above, is isolated and inserted into one or more vectors for further cloning and/or expression in a host cell. Such polynucleotide may be readily isolated and sequenced using conventional procedures. In one embodiment a vector, preferably an expression vector, comprising one or more of the polynucleotides of the invention is provided. Methods which are well known to those skilled in the art can be used to construct expression vectors containing the coding sequence of a T cell activating bispecific antigen binding molecule (fragment) along with appropriate transcriptional/translational control signals. These methods include in vitro recombinant DNA techniques, synthetic techniques and in vivo recombination/genetic recombination. See, for example, the techniques described in Maniatis et al., MOLECULAR CLONING: A LABORATORY MANUAL, Cold Spring Harbor Laboratory, N.Y. (1989); and Ausubel et al., CURRENT PROTOCOLS IN MOLECULAR BIOLOGY, Greene Publishing Associates and Wiley Interscience, N.Y (1989). The expression vector can be part of a plasmid, virus, or may be a nucleic acid fragment. The expression vector includes an expression cassette into which the polynucleotide encoding the T cell activating bispecific antigen binding molecule (fragment) (i.e. the coding region) is cloned in operable association with a promoter and/or other transcription or translation control elements. As used herein, a “coding region” is a portion of nucleic acid which consists of codons translated into amino acids. Although a “stop codon” (TAG, TGA, or TAA) is not translated into an amino acid, it may be considered to be part of a coding region, if present, but any flanking sequences, for example promoters, ribosome binding sites, transcriptional terminators, introns, 5′ and 3′ untranslated regions, and the like, are not part of a coding region. Two or more coding regions can be present in a single polynucleotide construct, e.g. on a single vector, or in separate polynucleotide constructs, e.g. on separate (different) vectors. Furthermore, any vector may contain a single coding region, or may comprise two or more coding regions, e.g. a vector of the present invention may encode one or more polypeptides, which are post- or co-translationally separated into the final proteins via proteolytic cleavage. In addition, a vector, polynucleotide, or nucleic acid of the invention may encode heterologous coding regions, either fused or unfused to a polynucleotide encoding the T cell activating bispecific antigen binding molecule (fragment) of the invention, or variant or derivative thereof. Heterologous coding regions include without limitation specialized elements or motifs, such as a secretory signal peptide or a heterologous functional domain. An operable association is when a coding region for a gene product, e.g. a polypeptide, is associated with one or more regulatory sequences in such a way as to place expression of the gene product under the influence or control of the regulatory sequence(s). Two DNA fragments (such as a polypeptide coding region and a promoter associated therewith) are “operably associated” if induction of promoter function results in the transcription of mRNA encoding the desired gene product and if the nature of the linkage between the two DNA fragments does not interfere with the ability of the expression regulatory sequences to direct the expression of the gene product or interfere with the ability of the DNA template to be transcribed. Thus, a promoter region would be operably associated with a nucleic acid encoding a polypeptide if the promoter was capable of effecting transcription of that nucleic acid. The promoter may be a cell-specific promoter that directs substantial transcription of the DNA only in predetermined cells. Other transcription control elements, besides a promoter, for example enhancers, operators, repressors, and transcription termination signals, can be operably associated with the polynucleotide to direct cell-specific transcription. Suitable promoters and other transcription control regions are disclosed herein. A variety of transcription control regions are known to those skilled in the art. These include, without limitation, transcription control regions, which function in vertebrate cells, such as, but not limited to, promoter and enhancer segments from cytomegaloviruses (e.g. the immediate early promoter, in conjunction with intron-A), simian virus 40 (e.g. the early promoter), and retroviruses (such as, e.g. Rous sarcoma virus). Other transcription control regions include those derived from vertebrate genes such as actin, heat shock protein, bovine growth hormone and rabbit d-globin, as well as other sequences capable of controlling gene expression in eukaryotic cells. Additional suitable transcription control regions include tissue-specific promoters and enhancers as well as inducible promoters (e.g. promoters inducible tetracycline). Similarly, a variety of translation control elements are known to those of ordinary skill in the art. These include, but are not limited to ribosome binding sites, translation initiation and termination codons, and elements derived from viral systems (particularly an internal ribosome entry site, or IRES, also referred to as a CITE sequence). The expression cassette may also include other features such as an origin of replication, and/or chromosome integration elements such as retroviral long terminal repeats (LTRs), or adeno-associated viral (AAV) inverted terminal repeats (ITRs).

[0313] Polynucleotide and nucleic acid coding regions of the present invention may be associated with additional coding regions which encode secretory or signal peptides, which direct the secretion of a polypeptide encoded by a polynucleotide of the present invention. For example, if secretion of the T cell activating bispecific antigen binding molecule is desired, DNA encoding a signal sequence may be placed upstream of the nucleic acid encoding a T cell activating bispecific antigen binding molecule of the invention or a fragment thereof. According to the signal hypothesis, proteins secreted by mammalian cells have a signal peptide or secretory leader sequence which is cleaved from the mature protein once export of the growing protein chain across the rough endoplasmic reticulum has been initiated. Those of ordinary skill in the art are aware that polypeptides secreted by vertebrate cells generally have a signal peptide fused to the N-terminus of the polypeptide, which is cleaved from the translated polypeptide to produce a secreted or “mature” form of the polypeptide. In certain embodiments, the native signal peptide, e.g. an immunoglobulin heavy chain or light chain signal peptide is used, or a functional derivative of that sequence that retains the ability to direct the secretion of the polypeptide that is operably associated with it. Alternatively, a heterologous mammalian signal peptide, or a functional derivative thereof, may be used. For example, the wild-type leader sequence may be substituted with the leader sequence of human tissue plasminogen activator (TPA) or mouse β-glucuronidase. Exemplary amino acid and polynucleotide sequences of secretory signal peptides are given in SEQ ID NOs 154-162.

[0314] DNA encoding a short protein sequence that could be used to facilitate later purification (e.g. a histidine tag) or assist in labeling the T cell activating bispecific antigen binding molecule may be included within or at the ends of the T cell activating bispecific antigen binding molecule (fragment) encoding polynucleotide.

[0315] In a further embodiment, a host cell comprising one or more polynucleotides of the invention is provided. In certain embodiments a host cell comprising one or more vectors of the invention is provided. The polynucleotides and vectors may incorporate any of the features, singly or in combination, described herein in relation to polynucleotides and vectors, respectively. In one such embodiment a host cell comprises (e.g. has been transformed or transfected with) a vector comprising a polynucleotide that encodes (part of) a T cell activating bispecific antigen binding molecule of the invention. As used herein, the term “host cell” refers to any kind of cellular system which can be engineered to generate the T cell activating bispecific antigen binding molecules of the invention or fragments thereof. Host cells suitable for replicating and for supporting expression of T cell activating bispecific antigen binding molecules are well known in the art. Such cells may be transfected or transduced as appropriate with the particular expression vector and large quantities of vector containing cells can be grown for seeding large scale fermenters to obtain sufficient quantities of the T cell activating bispecific antigen binding molecule for clinical applications. Suitable host cells include prokaryotic microorganisms, such as E. coli, or various eukaryotic cells, such as Chinese hamster ovary cells (CHO), insect cells, or the like. For example, polypeptides may be produced in bacteria in particular when glycosylation is not needed. After expression, the polypeptide may be isolated from the bacterial cell paste in a soluble fraction and can be further purified. In addition to prokaryotes, eukaryotic microbes such as filamentous fungi or yeast are suitable cloning or expression hosts for polypeptide-encoding vectors, including fungi and yeast strains whose glycosylation pathways have been “humanized”, resulting in the production of a polypeptide with a partially or fully human glycosylation pattern. See Gerngross, Nat Biotech 22, 1409-1414 (2004), and Li et al., Nat Biotech 24, 210-215 (2006).

[0316] Suitable host cells for the expression of (glycosylated) polypeptides are also derived from multicellular organisms (invertebrates and vertebrates). Examples of invertebrate cells include plant and insect cells. Numerous baculoviral strains have been identified which may be used in conjunction with insect cells, particularly for transfection of Spodoptera frugiperda cells. Plant cell cultures can also be utilized as hosts. See e.g. U.S. Pat. Nos. 5,959,177, 6,040,498, 6,420,548, 7,125,978, and 6,417,429 (describing PLANTIBODIES™ technology for producing antibodies in transgenic plants). Vertebrate cells may also be used as hosts. For example, mammalian cell lines that are adapted to grow in suspension may be useful. Other examples of useful mammalian host cell lines are monkey kidney CV1 line transformed by SV40 (COS-7); human embryonic kidney line (293 or 293T cells as described, e.g., in Graham et al., J Gen Virol 36, 59 (1977)), baby hamster kidney cells (BHK), mouse sertoli cells (TM4 cells as described, e.g., in Mather, Biol Reprod 23, 243-251 (1980)), monkey kidney cells (CV1), African green monkey kidney cells (VERO-76), human cervical carcinoma cells (HELA), canine kidney cells (MDCK), buffalo rat liver cells (BRL 3A), human lung cells (W138), human liver cells (Hep G2), mouse mammary tumor cells (MMT 060562), TRI cells (as described, e.g., in Mather et al., Annals N.Y. Acad Sci 383, 44-68 (1982)), MRC 5 cells, and FS4 cells. Other useful mammalian host cell lines include Chinese hamster ovary (CHO) cells, including dhfr⁻ CHO cells (Urlaub et al., Proc Natl Acad Sci USA 77, 4216 (1980)); and myeloma cell lines such as YO, NS0, P3X63 and Sp2/0. For a review of certain mammalian host cell lines suitable for protein production, see, e.g., Yazaki and Wu, Methods in Molecular Biology, Vol. 248 (B. K. C. Lo, ed., Humana Press, Totowa, N.J.), pp. 255-268 (2003). Host cells include cultured cells, e.g., mammalian cultured cells, yeast cells, insect cells, bacterial cells and plant cells, to name only a few, but also cells comprised within a transgenic animal, transgenic plant or cultured plant or animal tissue. In one embodiment, the host cell is a eukaryotic cell, preferably a mammalian cell, such as a Chinese Hamster Ovary (CHO) cell, a human embryonic kidney (HEK) cell or a lymphoid cell (e.g., Y0, NS0, Sp20 cell).

[0317] Standard technologies are known in the art to express foreign genes in these systems. Cells expressing a polypeptide comprising either the heavy or the light chain of an antigen binding domain such as an antibody, may be engineered so as to also express the other of the antibody chains such that the expressed product is an antibody that has both a heavy and a light chain.

[0318] In one embodiment, a method of producing a T cell activating bispecific antigen binding molecule according to the invention is provided, wherein the method comprises culturing a host cell comprising a polynucleotide encoding the T cell activating bispecific antigen binding molecule, as provided herein, under conditions suitable for expression of the T cell activating bispecific antigen binding molecule, and recovering the T cell activating bispecific antigen binding molecule from the host cell (or host cell culture medium).

[0319] The components of the T cell activating bispecific antigen binding molecule are genetically fused to each other. T cell activating bispecific antigen binding molecule can be designed such that its components are fused directly to each other or indirectly through a linker sequence. The composition and length of the linker may be determined in accordance with methods well known in the art and may be tested for efficacy. Examples of linker sequences between different components of T cell activating bispecific antigen binding molecules are found in the sequences provided herein. Additional sequences may also be included to incorporate a cleavage site to separate the individual components of the fusion if desired, for example an endopeptidase recognition sequence.

[0320] In certain embodiments the one or more antigen binding moieties of the T cell activating bispecific antigen binding molecules comprise at least an antibody variable region capable of binding an antigenic determinant. Variable regions can form part of and be derived from naturally or non-naturally occurring antibodies and fragments thereof. Methods to produce polyclonal antibodies and monoclonal antibodies are well known in the art (see e.g. Harlow and Lane, “Antibodies, a laboratory manual”, Cold Spring Harbor Laboratory, 1988). Non-naturally occurring antibodies can be constructed using solid phase-peptide synthesis, can be produced recombinantly (e.g. as described in U.S. Pat. No. 4,186,567) or can be obtained, for example, by screening combinatorial libraries comprising variable heavy chains and variable light chains (see e.g. U.S. Pat. No. 5,969,108 to McCafferty).

[0321] Any animal species of antibody, antibody fragment, antigen binding domain or variable region can be used in the T cell activating bispecific antigen binding molecules of the invention. Non-limiting antibodies, antibody fragments, antigen binding domains or variable regions useful in the present invention can be of murine, primate, or human origin. If the T cell activating bispecific antigen binding molecule is intended for human use, a chimeric form of antibody may be used wherein the constant regions of the antibody are from a human. A humanized or fully human form of the antibody can also be prepared in accordance with methods well known in the art (see e. g. U.S. Pat. No. 5,565,332 to Winter). Humanization may be achieved by various methods including, but not limited to (a) grafting the non-human (e.g., donor antibody) CDRs onto human (e.g. recipient antibody) framework and constant regions with or without retention of critical framework residues (e.g. those that are important for retaining good antigen binding affinity or antibody functions), (b) grafting only the non-human specificity-determining regions (SDRs or a-CDRs; the residues critical for the antibody-antigen interaction) onto human framework and constant regions, or (c) transplanting the entire non-human variable domains, but “cloaking” them with a human-like section by replacement of surface residues. Humanized antibodies and methods of making them are reviewed, e.g., in Almagro and Fransson, Front Biosci 13, 1619-1633 (2008), and are further described, e.g., in Riechmann et al., Nature 332, 323-329 (1988); Queen et al., Proc Natl Acad Sci USA 86, 10029-10033 (1989); U.S. Pat. Nos. 5,821,337, 7,527,791, 6,982,321, and U.S. Pat. No. 7,087,409; Jones et al., Nature 321, 522-525 (1986); Morrison et al., Proc Natl Acad Sci 81, 6851-6855 (1984); Morrison and Oi, Adv Immunol 44, 65-92 (1988); Verhoeyen et al., Science 239, 1534-1536 (1988); Padlan, Molec Immun 31(3), 169-217 (1994); Kashmiri et al., Methods 36, 25-34 (2005) (describing SDR (a-CDR) grafting); Padlan, Mol Immunol 28, 489-498 (1991) (describing “resurfacing”); Dall'Acqua et al., Methods 36, 43-60 (2005) (describing “FR shuffling”); and Osbourn et al., Methods 36, 61-68 (2005) and Klimka et al., Br J Cancer 83, 252-260 (2000) (describing the “guided selection” approach to FR shuffling). Human antibodies and human variable regions can be produced using various techniques known in the art. Human antibodies are described generally in van Dijk and van de Winkel, Curr Opin Pharmacol 5, 368-74 (2001) and Lonberg, Curr Opin Immunol 20, 450-459 (2008). Human variable regions can form part of and be derived from human monoclonal antibodies made by the hybridoma method (see e.g. Monoclonal Antibody Production Techniques and Applications, pp. 51-63 (Marcel Dekker, Inc., New York, 1987)). Human antibodies and human variable regions may also be prepared by administering an immunogen to a transgenic animal that has been modified to produce intact human antibodies or intact antibodies with human variable regions in response to antigenic challenge (see e.g. Lonberg, Nat Biotech 23, 1117-1125 (2005). Human antibodies and human variable regions may also be generated by isolating Fv clone variable region sequences selected from human-derived phage display libraries (see e.g., Hoogenboom et al. in Methods in Molecular Biology 178, 1-37 (O'Brien et al., ed., Human Press, Totowa, N.J., 2001); and McCafferty et al., Nature 348, 552-554; Clackson et al., Nature 352, 624-628 (1991)). Phage typically display antibody fragments, either as single-chain Fv (scFv) fragments or as Fab fragments.

[0322] In certain embodiments, the antigen binding moieties useful in the present invention are engineered to have enhanced binding affinity according to, for example, the methods disclosed in U.S. Pat. Appl. Publ. No. 2004/0132066, the entire contents of which are hereby incorporated by reference. The ability of the T cell activating bispecific antigen binding molecule of the invention to bind to a specific antigenic determinant can be measured either through an enzyme-linked immunosorbent assay (ELISA) or other techniques familiar to one of skill in the art, e.g. surface plasmon resonance technique (analyzed on a BIACORE T100 system) (Liljeblad, et al., Glyco J 17, 323-329 (2000)), and traditional binding assays (Heeley, Endocr Res 28, 217-229 (2002)). Competition assays may be used to identify an antibody, antibody fragment, antigen binding domain or variable domain that competes with a reference antibody for binding to a particular antigen, e.g. an antibody that competes with the V9 antibody for binding to CD3. In certain embodiments, such a competing antibody binds to the same epitope (e.g. a linear or a conformational epitope) that is bound by the reference antibody. Detailed exemplary methods for mapping an epitope to which an antibody binds are provided in Morris (1996) “Epitope Mapping Protocols,” in Methods in Molecular Biology vol. 66 (Humana Press, Totowa, N.J.). In an exemplary competition assay, immobilized antigen (e.g. CD3) is incubated in a solution comprising a first labeled antibody that binds to the antigen (e.g. V9 antibody) and a second unlabeled antibody that is being tested for its ability to compete with the first antibody for binding to the antigen. The second antibody may be present in a hybridoma supernatant. As a control, immobilized antigen is incubated in a solution comprising the first labeled antibody but not the second unlabeled antibody. After incubation under conditions permissive for binding of the first antibody to the antigen, excess unbound antibody is removed, and the amount of label associated with immobilized antigen is measured. If the amount of label associated with immobilized antigen is substantially reduced in the test sample relative to the control sample, then that indicates that the second antibody is competing with the first antibody for binding to the antigen. See Harlow and Lane (1988) Antibodies: A Laboratory Manual ch.14 (Cold Spring Harbor Laboratory, Cold Spring Harbor, N.Y.).

[0323] T cell activating bispecific antigen binding molecules prepared as described herein may be purified by art-known techniques such as high performance liquid chromatography, ion exchange chromatography, gel electrophoresis, affinity chromatography, size exclusion chromatography, and the like. The actual conditions used to purify a particular protein will depend, in part, on factors such as net charge, hydrophobicity, hydrophilicity etc., and will be apparent to those having skill in the art. For affinity chromatography purification an antibody, ligand, receptor or antigen can be used to which the T cell activating bispecific antigen binding molecule binds. For example, for affinity chromatography purification of T cell activating bispecific antigen binding molecules of the invention, a matrix with protein A or protein G may be used. Sequential Protein A or G affinity chromatography and size exclusion chromatography can be used to isolate a T cell activating bispecific antigen binding molecule essentially as described in the Examples. The purity of the T cell activating bispecific antigen binding molecule can be determined by any of a variety of well known analytical methods including gel electrophoresis, high pressure liquid chromatography, and the like. For example, the heavy chain fusion proteins expressed as described in the Examples were shown to be intact and properly assembled as demonstrated by reducing SDS-PAGE (see e.g. FIG. 2). Three bands were resolved at approximately Mr 25,000, Mr 50,000 and Mr 75,000, corresponding to the predicted molecular weights of the T cell activating bispecific antigen binding molecule light chain, heavy chain and heavy chain/light chain fusion protein.

### Assays

[0324] T cell activating bispecific antigen binding molecules provided herein may be identified, screened for, or characterized for their physical/chemical properties and/or biological activities by various assays known in the art.

### Affinity Assays

[0325] The affinity of the T cell activating bispecific antigen binding molecule for an Fc receptor or a target antigen can be determined in accordance with the methods set forth in the Examples by surface plasmon resonance (SPR), using standard instrumentation such as a BIAcore instrument (GE Healthcare), and receptors or target proteins such as may be obtained by recombinant expression. Alternatively, binding of T cell activating bispecific antigen binding molecules for different receptors or target antigens may be evaluated using cell lines expressing the particular receptor or target antigen, for example by flow cytometry (FACS). A specific illustrative and exemplary embodiment for measuring binding affinity is described in the following and in the Examples below.

[0326] According to one embodiment, K_{D} is measured by surface plasmon resonance using a BIACORE® T100 machine (GE Healthcare) at 25° C.

[0327] To analyze the interaction between the Fc-portion and Fc receptors, His-tagged recombinant Fc-receptor is captured by an anti-Penta His antibody (Qiagen) immobilized on CM5 chips and the bispecific constructs are used as analytes. Briefly, carboxymethylated dextran biosensor chips (CM5, GE Healthcare) are activated with N-ethyl-N′-(3-dimethylaminopropyl)-carbodiimide hydrochloride (EDC) and N-hydroxysuccinimide (NHS) according to the supplier's instructions. Anti Penta-His antibody is diluted with 10 mM sodium acetate, pH 5.0, to 40 μg/ml before injection at a flow rate of 5 μl/min to achieve approximately 6500 response units (RU) of coupled protein. Following the injection of the ligand, 1 M ethanolamine is injected to block unreacted groups. Subsequently the Fc-receptor is captured for 60 s at 4 or 10 nM. For kinetic measurements, four-fold serial dilutions of the bispecific construct (range between 500 nM and 4000 nM) are injected in HBS-EP (GE Healthcare, 10 mM HEPES, 150 mM NaCl, 3 mM EDTA, 0.05% Surfactant P20, pH 7.4) at 25° C. at a flow rate of 30 μl/min for 120 s.

[0328] To determine the affinity to the target antigen, bispecific constructs are captured by an anti human Fab specific antibody (GE Healthcare) that is immobilized on an activated CM5-sensor chip surface as described for the anti Penta-His antibody. The final amount of coupled protein is is approximately 12000 RU. The bispecific constructs are captured for 90 s at 300 nM. The target antigens are passed through the flow cells for 180 s at a concentration range from 250 to 1000 nM with a flowrate of 30 μl/min. The dissociation is monitored for 180 s.

[0329] Bulk refractive index differences are corrected for by subtracting the response obtained on reference flow cell. The steady state response was used to derive the dissociation constant K_{D} by non-linear curve fitting of the Langmuir binding isotherm. Association rates (kₒₙ) and dissociation rates (k_{off}) are calculated using a simple one-to-one Langmuir binding model (BIACORE® T100 Evaluation Software version 1.1.1) by simultaneously fitting the association and dissociation sensorgrams. The equilibrium dissociation constant (K_{D}) is calculated as the ratio k_{off}/kₒₙ. See, e.g., Chen et al., J Mol Biol 293, 865-881 (1999).

### Activity Assays

[0330] Biological activity of the T cell activating bispecific antigen binding molecules of the invention can be measured by various assays as described in the Examples. Biological activities may for example include the induction of proliferation of T cells, the induction of signaling in T cells, the induction of expression of activation markers in T cells, the induction of cytokine secretion by T cells, the induction of lysis of target cells such as tumor cells, and the induction of tumor regression and/or the improvement of survival.

### Compositions, Formulations, and Routes of Administration

[0331] In a further aspect, the invention provides pharmaceutical compositions comprising any of the T cell activating bispecific antigen binding molecules provided herein, e.g., for use in any of the below therapeutic methods. In one embodiment, a pharmaceutical composition comprises any of the T cell activating bispecific antigen binding molecules provided herein and a pharmaceutically acceptable carrier. In another embodiment, a pharmaceutical composition comprises any of the T cell activating bispecific antigen binding molecules provided herein and at least one additional therapeutic agent, e.g., as described below.

[0332] Further provided is a method of producing a T cell activating bispecific antigen binding molecule of the invention in a form suitable for administration in vivo, the method comprising (a) obtaining a T cell activating bispecific antigen binding molecule according to the invention, and (b) formulating the T cell activating bispecific antigen binding molecule with at least one pharmaceutically acceptable carrier, whereby a preparation of T cell activating bispecific antigen binding molecule is formulated for administration in vivo.

[0333] Pharmaceutical compositions of the present invention comprise a therapeutically effective amount of one or more T cell activating bispecific antigen binding molecule dissolved or dispersed in a pharmaceutically acceptable carrier. The phrases “pharmaceutical or pharmacologically acceptable” refers to molecular entities and compositions that are generally non-toxic to recipients at the dosages and concentrations employed, i.e. do not produce an adverse, allergic or other untoward reaction when administered to an animal, such as, for example, a human, as appropriate. The preparation of a pharmaceutical composition that contains at least one T cell activating bispecific antigen binding molecule and optionally an additional active ingredient will be known to those of skill in the art in light of the present disclosure, as exemplified by Remington's Pharmaceutical Sciences, 18th Ed. Mack Printing Company, 1990, incorporated herein by reference. Moreover, for animal (e.g., human) administration, it will be understood that preparations should meet sterility, pyrogenicity, general safety and purity standards as required by FDA Office of Biological Standards or corresponding authorities in other countries. Preferred compositions are lyophilized formulations or aqueous solutions. As used herein, “pharmaceutically acceptable carrier” includes any and all solvents, buffers, dispersion media, coatings, surfactants, antioxidants, preservatives (e.g. antibacterial agents, antifungal agents), isotonic agents, absorption delaying agents, salts, preservatives, antioxidants, proteins, drugs, drug stabilizers, polymers, gels, binders, excipients, disintegration agents, lubricants, sweetening agents, flavoring agents, dyes, such like materials and combinations thereof, as would be known to one of ordinary skill in the art (see, for example, Remington's Pharmaceutical Sciences, 18th Ed. Mack Printing Company, 1990, pp. 1289-1329, incorporated herein by reference). Except insofar as any conventional carrier is incompatible with the active ingredient, its use in the therapeutic or pharmaceutical compositions is contemplated.

[0334] The composition may comprise different types of carriers depending on whether it is to be administered in solid, liquid or aerosol form, and whether it need to be sterile for such routes of administration as injection. T cell activating bispecific antigen binding molecules of the present invention (and any additional therapeutic agent) can be administered intravenously, intradermally, intraarterially, intraperitoneally, intralesionally, intracranially, intraarticularly, intraprostatically, intrasplenically, intrarenally, intrapleurally, intratracheally, intranasally, intravitreally, intravaginally, intrarectally, intratumorally, intramuscularly, intraperitoneally, subcutaneously, subconjunctivally, intravesicularlly, mucosally, intrapericardially, intraumbilically, intraocularally, orally, topically, locally, by inhalation (e.g. aerosol inhalation), injection, infusion, continuous infusion, localized perfusion bathing target cells directly, via a catheter, via a lavage, in cremes, in lipid compositions (e.g. liposomes), or by other method or any combination of the forgoing as would be known to one of ordinary skill in the art (see, for example, Remington's Pharmaceutical Sciences, 18th Ed. Mack Printing Company, 1990, incorporated herein by reference). Parenteral administration, in particular intravenous injection, is most commonly used for administering polypeptide molecules such as the T cell activating bispecific antigen binding molecules of the invention.

[0335] Parenteral compositions include those designed for administration by injection, e.g. subcutaneous, intradermal, intralesional, intravenous, intraarterial intramuscular, intrathecal or intraperitoneal injection. For injection, the T cell activating bispecific antigen binding molecules of the invention may be formulated in aqueous solutions, preferably in physiologically compatible buffers such as Hanks' solution, Ringer's solution, or physiological saline buffer. The solution may contain formulatory agents such as suspending, stabilizing and/or dispersing agents. Alternatively, the T cell activating bispecific antigen binding molecules may be in powder form for constitution with a suitable vehicle, e.g., sterile pyrogen-free water, before use. Sterile injectable solutions are prepared by incorporating the T cell activating bispecific antigen binding molecules of the invention in the required amount in the appropriate solvent with various of the other ingredients enumerated below, as required. Sterility may be readily accomplished, e.g., by filtration through sterile filtration membranes. Generally, dispersions are prepared by incorporating the various sterilized active ingredients into a sterile vehicle which contains the basic dispersion medium and/or the other ingredients. In the case of sterile powders for the preparation of sterile injectable solutions, suspensions or emulsion, the preferred methods of preparation are vacuum-drying or freeze-drying techniques which yield a powder of the active ingredient plus any additional desired ingredient from a previously sterile-filtered liquid medium thereof. The liquid medium should be suitably buffered if necessary and the liquid diluent first rendered isotonic prior to injection with sufficient saline or glucose. The composition must be stable under the conditions of manufacture and storage, and preserved against the contaminating action of microorganisms, such as bacteria and fungi. It will be appreciated that endotoxin contamination should be kept minimally at a safe level, for example, less that 0.5 ng/mg protein. Suitable pharmaceutically acceptable carriers include, but are not limited to: buffers such as phosphate, citrate, and other organic acids; antioxidants including ascorbic acid and methionine; preservatives (such as octadecyldimethylbenzyl ammonium chloride; hexamethonium chloride; benzalkonium chloride; benzethonium chloride; phenol, butyl or benzyl alcohol; alkyl parabens such as methyl or propyl paraben; catechol; resorcinol; cyclohexanol; 3-pentanol; and m-cresol); low molecular weight (less than about 10 residues) polypeptides; proteins, such as serum albumin, gelatin, or immunoglobulins; hydrophilic polymers such as polyvinylpyrrolidone; amino acids such as glycine, glutamine, asparagine, histidine, arginine, or lysine; monosaccharides, disaccharides, and other carbohydrates including glucose, mannose, or dextrins; chelating agents such as EDTA; sugars such as sucrose, mannitol, trehalose or sorbitol; salt-forming counter-ions such as sodium; metal complexes (e.g. Zn-protein complexes); and/or non-ionic surfactants such as polyethylene glycol (PEG). Aqueous injection suspensions may contain compounds which increase the viscosity of the suspension, such as sodium carboxymethyl cellulose, sorbitol, dextran, or the like. Optionally, the suspension may also contain suitable stabilizers or agents which increase the solubility of the compounds to allow for the preparation of highly concentrated solutions. Additionally, suspensions of the active compounds may be prepared as appropriate oily injection suspensions. Suitable lipophilic solvents or vehicles include fatty oils such as sesame oil, or synthetic fatty acid esters, such as ethyl cleats or triglycerides, or liposomes.

[0336] Active ingredients may be entrapped in microcapsules prepared, for example, by coacervation techniques or by interfacial polymerization, for example, hydroxymethylcellulose or gelatin-microcapsules and poly-(methylmethacylate) microcapsules, respectively, in colloidal drug delivery systems (for example, liposomes, albumin microspheres, microemulsions, nano-particles and nanocapsules) or in macroemulsions. Such techniques are disclosed in Remington's Pharmaceutical Sciences (18th Ed. Mack Printing Company, 1990). Sustained-release preparations may be prepared. Suitable examples of sustained-release preparations include semipermeable matrices of solid hydrophobic polymers containing the polypeptide, which matrices are in the form of shaped articles, e.g. films, or microcapsules. In particular embodiments, prolonged absorption of an injectable composition can be brought about by the use in the compositions of agents delaying absorption, such as, for example, aluminum monostearate, gelatin or combinations thereof.

[0337] In addition to the compositions described previously, the T cell activating bispecific antigen binding molecules may also be formulated as a depot preparation. Such long acting formulations may be administered by implantation (for example subcutaneously or intramuscularly) or by intramuscular injection. Thus, for example, the T cell activating bispecific antigen binding molecules may be formulated with suitable polymeric or hydrophobic materials (for example as an emulsion in an acceptable oil) or ion exchange resins, or as sparingly soluble derivatives, for example, as a sparingly soluble salt.

[0338] Pharmaceutical compositions comprising the T cell activating bispecific antigen binding molecules of the invention may be manufactured by means of conventional mixing, dissolving, emulsifying, encapsulating, entrapping or lyophilizing processes. Pharmaceutical compositions may be formulated in conventional manner using one or more physiologically acceptable carriers, diluents, excipients or auxiliaries which facilitate processing of the proteins into preparations that can be used pharmaceutically. Proper formulation is dependent upon the route of administration chosen.

[0339] The T cell activating bispecific antigen binding molecules may be formulated into a composition in a free acid or base, neutral or salt form. Pharmaceutically acceptable salts are salts that substantially retain the biological activity of the free acid or base. These include the acid addition salts, e.g., those formed with the free amino groups of a proteinaceous composition, or which are formed with inorganic acids such as for example, hydrochloric or phosphoric acids, or such organic acids as acetic, oxalic, tartaric or mandelic acid. Salts formed with the free carboxyl groups can also be derived from inorganic bases such as for example, sodium, potassium, ammonium, calcium or ferric hydroxides; or such organic bases as isopropylamine, trimethylamine, histidine or procaine. Pharmaceutical salts tend to be more soluble in aqueous and other protic solvents than are the corresponding free base forms.

### Therapeutic Methods and Compositions

[0340] Any of the T cell activating bispecific antigen binding molecules provided herein may be used in therapeutic methods. T cell activating bispecific antigen binding molecules of the invention can be used as immunotherapeutic agents, for example in the treatment of cancers.

[0341] For use in therapeutic methods, T cell activating bispecific antigen binding molecules of the invention would be formulated, dosed, and administered in a fashion consistent with good medical practice. Factors for consideration in this context include the particular disorder being treated, the particular mammal being treated, the clinical condition of the individual patient, the cause of the disorder, the site of delivery of the agent, the method of administration, the scheduling of administration, and other factors known to medical practitioners.

[0342] In one aspect, T cell activating bispecific antigen binding molecules of the invention for use as a medicament are provided. In further aspects, T cell activating bispecific antigen binding molecules of the invention for use in treating a disease are provided. In certain embodiments, T cell activating bispecific antigen binding molecules of the invention for use in a method of treatment are provided. In one embodiment, the invention provides a T cell activating bispecific antigen binding molecule as described herein for use in the treatment of a disease in an individual in need thereof. In certain embodiments, the invention provides a T cell activating bispecific antigen binding molecule for use in a method of treating an individual having a disease comprising administering to the individual a therapeutically effective amount of the T cell activating bispecific antigen binding molecule. In certain embodiments the disease to be treated is a proliferative disorder. In a particular embodiment the disease is cancer. In certain embodiments the method further comprises administering to the individual a therapeutically effective amount of at least one additional therapeutic agent, e.g., an anti-cancer agent if the disease to be treated is cancer. In further embodiments, the invention provides a T cell activating bispecific antigen binding molecule as described herein for use in inducing lysis of a target cell, particularly a tumor cell. In certain embodiments, the invention provides a T cell activating bispecific antigen binding molecule for use in a method of inducing lysis of a target cell, particularly a tumor cell, in an individual comprising administering to the individual an effective amount of the T cell activating bispecific antigen binding molecule to induce lysis of a target cell. An “individual” according to any of the above embodiments is a mammal, preferably a human.

[0343] In a further aspect, the invention provides for the use of a T cell activating bispecific antigen binding molecule of the invention in the manufacture or preparation of a medicament. In one embodiment the medicament is for the treatment of a disease in an individual in need thereof. In a further embodiment, the medicament is for use in a method of treating a disease comprising administering to an individual having the disease a therapeutically effective amount of the medicament. In certain embodiments the disease to be treated is a proliferative disorder. In a particular embodiment the disease is cancer. In one embodiment, the method further comprises administering to the individual a therapeutically effective amount of at least one additional therapeutic agent, e.g., an anti-cancer agent if the disease to be treated is cancer. In a further embodiment, the medicament is for inducing lysis of a target cell, particularly a tumor cell. In still a further embodiment, the medicament is for use in a method of inducing lysis of a target cell, particularly a tumor cell, in an individual comprising administering to the individual an effective amount of the medicament to induce lysis of a target cell. An “individual” according to any of the above embodiments may be a mammal, preferably a human.

[0344] In a further aspect, the invention provides a method for treating a disease. In one embodiment, the method comprises administering to an individual having such disease a therapeutically effective amount of a T cell activating bispecific antigen binding molecule of the invention. In one embodiment a composition is administered to said individual, comprising the T cell activating bispecific antigen binding molecule of the invention in a pharmaceutically acceptable form. In certain embodiments the disease to be treated is a proliferative disorder. In a particular embodiment the disease is cancer. In certain embodiments the method further comprises administering to the individual a therapeutically effective amount of at least one additional therapeutic agent, e.g., an anti-cancer agent if the disease to be treated is cancer. An “individual” according to any of the above embodiments may be a mammal, preferably a human.

[0345] In a further aspect, the invention provides a method for inducing lysis of a target cell, particularly a tumor cell. In one embodiment the method comprises contacting a target cell with a T cell activating bispecific antigen binding molecule of the invention in the presence of a T cell, particularly a cytotoxic T cell. In a further aspect, a method for inducing lysis of a target cell, particularly a tumor cell, in an individual is provided. In one such embodiment, the method comprises administering to the individual an effective amount of a T cell activating bispecific antigen binding molecule to induce lysis of a target cell. In one embodiment, an “individual” is a human.

[0346] In certain embodiments the disease to be treated is a proliferative disorder, particularly cancer. Non-limiting examples of cancers include bladder cancer, brain cancer, head and neck cancer, pancreatic cancer, lung cancer, breast cancer, ovarian cancer, uterine cancer, cervical cancer, endometrial cancer, esophageal cancer, colon cancer, colorectal cancer, rectal cancer, gastric cancer, prostate cancer, blood cancer, skin cancer, squamous cell carcinoma, bone cancer, and kidney cancer. Other cell proliferation disorders that can be treated using a T cell activating bispecific antigen binding molecule of the present invention include, but are not limited to neoplasms located in the: abdomen, bone, breast, digestive system, liver, pancreas, peritoneum, endocrine glands (adrenal, parathyroid, pituitary, testicles, ovary, thymus, thyroid), eye, head and neck, nervous system (central and peripheral), lymphatic system, pelvic, skin, soft tissue, spleen, thoracic region, and urogenital system. Also included are pre-cancerous conditions or lesions and cancer metastases. In certain embodiments the cancer is chosen from the group consisting of renal cell cancer, skin cancer, lung cancer, colorectal cancer, breast cancer, brain cancer, head and neck cancer. A skilled artisan readily recognizes that in many cases the T cell activating bispecific antigen binding molecule may not provide a cure but may only provide partial benefit. In some embodiments, a physiological change having some benefit is also considered therapeutically beneficial. Thus, in some embodiments, an amount of T cell activating bispecific antigen binding molecule that provides a physiological change is considered an “effective amount” or a “therapeutically effective amount”. The subject, patient, or individual in need of treatment is typically a mammal, more specifically a human.

[0347] In some embodiments, an effective amount of a T cell activating bispecific antigen binding molecule of the invention is administered to a cell. In other embodiments, a therapeutically effective amount of a T cell activating bispecific antigen binding molecule of the invention is administered to an individual for the treatment of disease.

[0348] For the prevention or treatment of disease, the appropriate dosage of a T cell activating bispecific antigen binding molecule of the invention (when used alone or in combination with one or more other additional therapeutic agents) will depend on the type of disease to be treated, the route of administration, the body weight of the patient, the type of T cell activating bispecific antigen binding molecule, the severity and course of the disease, whether the T cell activating bispecific antigen binding molecule is administered for preventive or therapeutic purposes, previous or concurrent therapeutic interventions, the patient's clinical history and response to the T cell activating bispecific antigen binding molecule, and the discretion of the attending physician. The practitioner responsible for administration will, in any event, determine the concentration of active ingredient(s) in a composition and appropriate dose(s) for the individual subject. Various dosing schedules including but not limited to single or multiple administrations over various time-points, bolus administration, and pulse infusion are contemplated herein.

[0349] The T cell activating bispecific antigen binding molecule is suitably administered to the patient at one time or over a series of treatments. Depending on the type and severity of the disease, about 1 μg/kg to 15 mg/kg (e.g. 0.1 mg/kg-10 mg/kg) of T cell activating bispecific antigen binding molecule can be an initial candidate dosage for administration to the patient, whether, for example, by one or more separate administrations, or by continuous infusion. One typical daily dosage might range from about 1 μg/kg to 100 mg/kg or more, depending on the factors mentioned above. For repeated administrations over several days or longer, depending on the condition, the treatment would generally be sustained until a desired suppression of disease symptoms occurs. One exemplary dosage of the T cell activating bispecific antigen binding molecule would be in the range from about 0.005 mg/kg to about 10 mg/kg. In other non-limiting examples, a dose may also comprise from about 1 microgram/kg body weight, about 5 microgram/kg body weight, about 10 microgram/kg body weight, about 50 microgram/kg body weight, about 100 microgram/kg body weight, about 200 microgram/kg body weight, about 350 microgram/kg body weight, about 500 microgram/kg body weight, about 1 milligram/kg body weight, about 5 milligram/kg body weight, about 10 milligram/kg body weight, about 50 milligram/kg body weight, about 100 milligram/kg body weight, about 200 milligram/kg body weight, about 350 milligram/kg body weight, about 500 milligram/kg body weight, to about 1000 mg/kg body weight or more per administration, and any range derivable therein. In non-limiting examples of a derivable range from the numbers listed herein, a range of about 5 mg/kg body weight to about 100 mg/kg body weight, about 5 microgram/kg body weight to about 500 milligram/kg body weight, etc., can be administered, based on the numbers described above. Thus, one or more doses of about 0.5 mg/kg, 2.0 mg/kg, 5.0 mg/kg or 10 mg/kg (or any combination thereof) may be administered to the patient. Such doses may be administered intermittently, e.g. every week or every three weeks (e.g. such that the patient receives from about two to about twenty, or e.g. about six doses of the T cell activating bispecific antigen binding molecule). An initial higher loading dose, followed by one or more lower doses may be administered. However, other dosage regimens may be useful. The progress of this therapy is easily monitored by conventional techniques and assays.

[0350] The T cell activating bispecific antigen binding molecules of the invention will generally be used in an amount effective to achieve the intended purpose. For use to treat or prevent a disease condition, the T cell activating bispecific antigen binding molecules of the invention, or pharmaceutical compositions thereof, are administered or applied in a therapeutically effective amount. Determination of a therapeutically effective amount is well within the capabilities of those skilled in the art, especially in light of the detailed disclosure provided herein.

[0351] For systemic administration, a therapeutically effective dose can be estimated initially from in vitro assays, such as cell culture assays. A dose can then be formulated in animal models to achieve a circulating concentration range that includes the IC₅₀ as determined in cell culture. Such information can be used to more accurately determine useful doses in humans.

[0352] Initial dosages can also be estimated from in vivo data, e.g., animal models, using techniques that are well known in the art. One having ordinary skill in the art could readily optimize administration to humans based on animal data.

[0353] Dosage amount and interval may be adjusted individually to provide plasma levels of the T cell activating bispecific antigen binding molecules which are sufficient to maintain therapeutic effect. Usual patient dosages for administration by injection range from about 0.1 to 50 mg/kg/day, typically from about 0.5 to 1 mg/kg/day. Therapeutically effective plasma levels may be achieved by administering multiple doses each day. Levels in plasma may be measured, for example, by HPLC.

[0354] In cases of local administration or selective uptake, the effective local concentration of the T cell activating bispecific antigen binding molecules may not be related to plasma concentration. One having skill in the art will be able to optimize therapeutically effective local dosages without undue experimentation.

[0355] A therapeutically effective dose of the T cell activating bispecific antigen binding molecules described herein will generally provide therapeutic benefit without causing substantial toxicity. Toxicity and therapeutic efficacy of a T cell activating bispecific antigen binding molecule can be determined by standard pharmaceutical procedures in cell culture or experimental animals. Cell culture assays and animal studies can be used to determine the LD₅₀ (the dose lethal to 50% of a population) and the ED₅₀ (the dose therapeutically effective in 50% of a population). The dose ratio between toxic and therapeutic effects is the therapeutic index, which can be expressed as the ratio LD₅₀/ED₅₀. T cell activating bispecific antigen binding molecules that exhibit large therapeutic indices are preferred. In one embodiment, the T cell activating bispecific antigen binding molecule according to the present invention exhibits a high therapeutic index. The data obtained from cell culture assays and animal studies can be used in formulating a range of dosages suitable for use in humans. The dosage lies preferably within a range of circulating concentrations that include the ED₅₀ with little or no toxicity. The dosage may vary within this range depending upon a variety of factors, e.g., the dosage form employed, the route of administration utilized, the condition of the subject, and the like. The exact formulation, route of administration and dosage can be chosen by the individual physician in view of the patient's condition (see, e.g., Fingl et al., 1975, in: The Pharmacological Basis of Therapeutics, Ch. 1, p. 1, incorporated herein by reference in its entirety).

[0356] The attending physician for patients treated with T cell activating bispecific antigen binding molecules of the invention would know how and when to terminate, interrupt, or adjust administration due to toxicity, organ dysfunction, and the like. Conversely, the attending physician would also know to adjust treatment to higher levels if the clinical response were not adequate (precluding toxicity). The magnitude of an administered dose in the management of the disorder of interest will vary with the severity of the condition to be treated, with the route of administration, and the like. The severity of the condition may, for example, be evaluated, in part, by standard prognostic evaluation methods. Further, the dose and perhaps dose frequency will also vary according to the age, body weight, and response of the individual patient.

### Other Agents and Treatments

[0357] The T cell activating bispecific antigen binding molecules of the invention may be administered in combination with one or more other agents in therapy. For instance, a T cell activating bispecific antigen binding molecule of the invention may be co-administered with at least one additional therapeutic agent. The term “therapeutic agent” encompasses any agent administered to treat a symptom or disease in an individual in need of such treatment. Such additional therapeutic agent may comprise any active ingredients suitable for the particular indication being treated, preferably those with complementary activities that do not adversely affect each other. In certain embodiments, an additional therapeutic agent is an immunomodulatory agent, a cytostatic agent, an inhibitor of cell adhesion, a cytotoxic agent, an activator of cell apoptosis, or an agent that increases the sensitivity of cells to apoptotic inducers. In a particular embodiment, the additional therapeutic agent is an anti-cancer agent, for example a microtubule disruptor, an antimetabolite, a topoisomerase inhibitor, a DNA intercalator, an alkylating agent, a hormonal therapy, a kinase inhibitor, a receptor antagonist, an activator of tumor cell apoptosis, or an antiangiogenic agent.

[0358] Such other agents are suitably present in combination in amounts that are effective for the purpose intended. The effective amount of such other agents depends on the amount of T cell activating bispecific antigen binding molecule used, the type of disorder or treatment, and other factors discussed above. The T cell activating bispecific antigen binding molecules are generally used in the same dosages and with administration routes as described herein, or about from 1 to 99% of the dosages described herein, or in any dosage and by any route that is empirically/clinically determined to be appropriate.

[0359] Such combination therapies noted above encompass combined administration (where two or more therapeutic agents are included in the same or separate compositions), and separate administration, in which case, administration of the T cell activating bispecific antigen binding molecule of the invention can occur prior to, simultaneously, and/or following, administration of the additional therapeutic agent and/or adjuvant. T cell activating bispecific antigen binding molecules of the invention can also be used in combination with radiation therapy.

### Articles of Manufacture

[0360] In another aspect of the invention, an article of manufacture containing materials useful for the treatment, prevention and/or diagnosis of the disorders described above is provided. The article of manufacture comprises a container and a label or package insert on or associated with the container. Suitable containers include, for example, bottles, vials, syringes, IV solution bags, etc. The containers may be formed from a variety of materials such as glass or plastic. The container holds a composition which is by itself or combined with another composition effective for treating, preventing and/or diagnosing the condition and may have a sterile access port (for example the container may be an intravenous solution bag or a vial having a stopper pierceable by a hypodermic injection needle). At least one active agent in the composition is a T cell activating bispecific antigen binding molecule of the invention. The label or package insert indicates that the composition is used for treating the condition of choice. Moreover, the article of manufacture may comprise (a) a first container with a composition contained therein, wherein the composition comprises a T cell activating bispecific antigen binding molecule of the invention; and (b) a second container with a composition contained therein, wherein the composition comprises a further cytotoxic or otherwise therapeutic agent. The article of manufacture in this embodiment of the invention may further comprise a package insert indicating that the compositions can be used to treat a particular condition. Alternatively, or additionally, the article of manufacture may further comprise a second (or third) container comprising a pharmaceutically-acceptable buffer, such as bacteriostatic water for injection (BWFI), phosphate-buffered saline, Ringer's solution and dextrose solution. It may further include other materials desirable from a commercial and user standpoint, including other buffers, diluents, filters, needles, and syringes.

### EXAMPLES

[0361] The following are examples of methods and compositions of the invention. It is understood that various other embodiments may be practiced, given the general description provided above.

### General Methods

### Recombinant DNA Techniques

[0362] Standard methods were used to manipulate DNA as described in Sambrook et al., Molecular cloning: A laboratory manual; Cold Spring Harbor Laboratory Press, Cold Spring Harbor, N.Y., 1989. The molecular biological reagents were used according to the manufacturers' instructions. General information regarding the nucleotide sequences of human immunoglobulins light and heavy chains is given in: Kabat, E. A. et al., (1991) Sequences of Proteins of Immunological Interest, 5^{th} ed., NIH Publication No. 91-3242.

### DNA Sequencing

[0363] DNA sequences were determined by double strand sequencing.

### Gene Synthesis

[0364] Desired gene segments where required were either generated by PCR using appropriate templates or were synthesized by Geneart AG (Regensburg, Germany) from synthetic oligonucleotides and PCR products by automated gene synthesis. In cases where no exact gene sequence was available, oligonucleotide primers were designed based on sequences from closest homologues and the genes were isolated by RT-PCR from RNA originating from the appropriate tissue. The gene segments flanked by singular restriction endonuclease cleavage sites were cloned into standard cloning/sequencing vectors. The plasmid DNA was purified from transformed bacteria and concentration determined by UV spectroscopy. The DNA sequence of the subcloned gene fragments was confirmed by DNA sequencing. Gene segments were designed with suitable restriction sites to allow sub-cloning into the respective expression vectors. All constructs were designed with a 5′-end DNA sequence coding for a leader peptide which targets proteins for secretion in eukaryotic cells. SEQ ID NOs 154-162 give exemplary leader peptides and polynucleotide sequences encoding them, respectively.

Isolation of Primary Human Pan T Cells from PBMCs

[0365] Peripheral blood mononuclear cells (PBMCs) were prepared by Histopaque density centrifugation from enriched lymphocyte preparations (buffy coats) obtained from local blood banks or from fresh blood from healthy human donors. Briefly, blood was diluted with sterile PBS and carefully layered over a Histopaque gradient (Sigma, H8889). After centrifugation for 30 minutes at 450×g at room temperature (brake switched off), part of the plasma above the PBMC containing interphase was discarded. The PBMCs were transferred into new 50 ml Falcon tubes and tubes were filled up with PBS to a total volume of 50 ml. The mixture was centrifuged at room temperature for 10 minutes at 400×g (brake switched on). The supernatant was discarded and the PBMC pellet washed twice with sterile PBS (centrifugation steps at 4° C. for 10 minutes at 350×g). The resulting PBMC population was counted automatically (ViCell) and stored in RPMI1640 medium, containing 10% FCS and 1% L-alanyl-L-glutamine (Biochrom, K0302) at 37° C., 5% CO₂ in the incubator until assay start.

[0366] T cell enrichment from PBMCs was performed using the Pan T Cell Isolation Kit II (Miltenyi Biotec #130-091-156), according to the manufacturer's instructions. Briefly, the cell pellets were diluted in 40 μl cold buffer per 10 million cells (PBS with 0.5% BSA, 2 mM EDTA, sterile filtered) and incubated with 10 μl Biotin-Antibody Cocktail per 10 million cells for 10 min at 4° C. 30 μl cold buffer and 20 μl Anti-Biotin magnetic beads per 10 million cells were added, and the mixture incubated for another 15 min at 4° C. Cells were washed by adding 10-20x the current volume and a subsequent centrifugation step at 300×g for 10 min. Up to 100 million cells were resuspended in 500 μl buffer. Magnetic separation of unlabeled human pan T cells was performed using LS columns (Miltenyi Biotec #130-042-401) according to the manufacturer's instructions. The resulting T cell population was counted automatically (ViCell) and stored in AIM-V medium at 37° C., 5% CO₂ in the incubator until assay start (not longer than 24 h).

Isolation of Primary Human Naive T Cells from PBMCs

[0367] Peripheral blood mononuclar cells (PBMCs) were prepared by Histopaque density centrifugation from enriched lymphocyte preparations (buffy coats) obtained from local blood banks or from fresh blood from healthy human donors. T-cell enrichment from PBMCs was performed using the Naive CD8⁺ T cell isolation Kit from Miltenyi Biotec (#130-093-244), according to the manufacturer's instructions, but skipping the last isolation step of CD8⁺ T cells (also see description for the isolation of primary human pan T cells).

Isolation of Murine Pan T Cells from Splenocytes

[0368] Spleens were isolated from C57BL/6 mice, transferred into a GentleMACS C-tube (Miltenyi Biotech #130-093-237) containing MACS buffer (PBS+0.5% BSA+2 mM EDTA) and dissociated with the GentleMACS Dissociator to obtain single-cell suspensions according to the manufacturer's instructions. The cell suspension was passed through a pre-separation filter to remove remaining undissociated tissue particles. After centrifugation at 400×g for 4 min at 4° C., ACK Lysis Buffer was added to lyse red blood cells (incubation for 5 min at room temperature). The remaining cells were washed with MACS buffer twice, counted and used for the isolation of murine pan T cells. The negative (magnetic) selection was performed using the Pan T Cell Isolation Kit from Miltenyi Biotec (#130-090-861), following the manufacturer's instructions. The resulting T cell population was automatically counted (ViCell) and immediately used for further assays.

Isolation of Primary Cynomolgus PBMCs from Heparinized Blood

[0369] Peripheral blood mononuclar cells (PBMCs) were prepared by density centrifugation from fresh blood from healthy cynomolgus donors, as follows: Heparinized blood was diluted 1:3 with sterile PBS, and Lymphoprep medium (Axon Lab #1114545) was diluted to 90% with sterile PBS. Two volumes of the diluted blood were layered over one volume of the diluted density gradient and the PBMC fraction was separated by centrifugation for 30 min at 520×g, without brake, at room temperature. The PBMC band was transferred into a fresh 50 ml Falcon tube and washed with sterile PBS by centrifugation for 10 min at 400×g at 4° C. One low-speed centrifugation was performed to remove the platelets (15 min at 150×g, 4° C.), and the resulting PBMC population was automatically counted (ViCell) and immediately used for further assays.

### Target Cells

[0370] For the assessment of MCSP-targeting bispecific antigen binding molecules, the following tumor cell lines were used: the human melanoma cell line WM266-4 (ATCC #CRL-1676), derived from a metastatic site of a malignant melanoma and expressing high levels of human MCSP; the human melanoma cell line MV-3 (a kind gift from The Radboud University Nijmegen Medical Centre), expressing medium levels of human MCSP; the human malignant melanoma (primary tumour) cell line A375 (ECACC #88113005) expressing high levels of MCSP; the human colon carcinoma cell line HCT-116 (ATCC #CCL-247) that does not express MCSP; and the human Caucasian colon adenocarcinoma cell line LS180 (ECACC #87021202) that does not express MCSP.

[0371] For the assessment of CEA-targeting bispecific antigen binding molecules, the following tumor cell lines were used: the human gastric cancer cell line MKN45 (DSMZ #ACC 409), expressing very high levels of human CEA; the human pancreas adenocarcinoma cell line HPAF-II (kind gift of Roche Nutley), expressing high levels of human CEA; the human primary pancreatic adenocarcinoma cell line BxPC-3 (ECACC #93120816) expressing medium levels of human CEA; the human female Caucasian colon adenocarcinoma cell line LS-174T (ECACC #87060401), expressing medium levels of human CEA; the human pancreas adenocarcinoma cell line ASPC-1 (ECACC #96020930) expressing low levels of human CEA; the human epithelioid pancreatic carcinoma cell line Panc-1 (ATCC #CRL-1469), expressing (very) low levels of human CEA; the human colon carcinoma cell line HCT-116 (ATCC #CCL-247) that does not express CEA; a human adenocarcinomic alveolar basal epithelial cell line A549-huCEA that was stably transfected in-house to express human CEA; and a murine colon carcinoma cell line MC38-huCEA, that was engineered in-house to stably express human CEA.

[0372] In addition, a human T cell leukaemia cell line, Jurkat (ATCC #TIB-152), was used to assess binding of different bispecific constructs to human CD3 on cells.

### Example 1

### Preparation, Purification and Characterization of Bispecific Antigen Binding Molecules

[0373] The heavy and light chain variable region sequences were subcloned in frame with either the constant heavy chain or the constant light chain pre-inserted into the respective recipient mammalian expression vector. The antibody expression was driven by an MPSV promoter and a synthetic polyA signal sequence is located at the 3′ end of the CDS. In addition each vector contained an EBV OriP sequence.

[0374] The molecules were produced by co-transfecting HEK293 EBNA cells with the mammalian expression vectors. Exponentially growing HEK293 EBNA cells were transfected using the calcium phosphate method. Alternatively, HEK293 EBNA cells growing in suspension were transfected using polyethylenimine (PEI). For preparation of “1+1 IgG scFab, one armed/one armed inverted” constructs, cells were transfected with the corresponding expression vectors in a 1:1:1 ratio (“vector heavy chain”:“vector light chain”:“vector heavy chain-scFab”). For preparation of “2+1 IgG scFab” constructs, cells were transfected with the corresponding expression vectors in a 1:2:1 ratio (“vector heavy chain”:“vector light chain”:“vector heavy chain-scFab”). For preparation of “1+1 IgG Crossfab” constructs, cells were transfected with the corresponding expression vectors in a 1:1:1:1 ratio (“vector second heavy chain”:“vector first light chain”:“vector light chain Crossfab”:“vector first heavy chain-heavy chain Crossfab”). For preparation of “2+1 IgG Crossfab” constructs cells were transfected with the corresponding expression vectors in a 1:2:1:1 ratio (“vector second heavy chain”:“vector light chain”:“vector first heavy chain-heavy chain Crossfab)”:“vector light chain Crossfab”. For preparation of the “2+1 IgG Crossfab, linked light chain” construct, cells were transfected with the corresponding expression vectors in a 1:1:1:1 ratio (“vector heavy chain”:“vector light chain”:“vector heavy chain (CrossFab-Fab-Fc)”:“vector linked light chain”). For preparation of the “1+1 CrossMab” construct, cells were transfected with the corresponding expression vectors in a 1:1:1:1 ratio (“vector first heavy chain”:“vector second heavy chain”:“vector first light chain”:“vector second light chain”). For preparation of the “1+1 IgG Crossfab light chain fusion” construct, cells were transfected with the corresponding expression vectors in a 1:1:1:1 ratio (“vector first heavy chain”:“vector second heavy chain”:“vector light chain Crossfab”:“vector second light chain”).

[0375] For transfection using calcium phosphate cells were grown as adherent monolayer cultures in T-flasks using DMEM culture medium supplemented with 10% (v/v) FCS, and transfected when they were between 50 and 80% confluent. For the transfection of a T150 flask, 15 million cells were seeded 24 hours before transfection in 25 ml DMEM culture medium supplemented with FCS (at 10% v/v final), and cells were placed at 37° C. in an incubator with a 5% CO₂ atmosphere overnight. For each T150 flask to be transfected, a solution of DNA, CaCl₂ and water was prepared by mixing 94 μg total plasmid vector DNA divided in the corresponding ratio, water to a final volume of 469 μl and 469 μl of a 1 M CaCl₂ solution. To this solution, 938 μl of a 50 mM HEPES, 280 mM NaCl, 1.5 mM Na₂HPO₄ solution at pH 7.05 were added, mixed immediately for 10 s and left to stand at room temperature for 20 s. The suspension was diluted with 10 ml of DMEM supplemented with 2% (v/v) FCS, and added to the T150 in place of the existing medium. Subsequently, additional 13 ml of transfection medium were added. The cells were incubated at 37° C., 5% CO₂ for about 17 to 20 hours, then medium was replaced with 25 ml DMEM, 10% FCS. The conditioned culture medium was harvested approximately 7 days post-media exchange by centrifugation for 15 min at 210×g, sterile filtered (0.22·m filter), supplemented with sodium azide to a final concentration of 0.01% (w/v), and kept at 4° C.

[0376] For transfection using polyethylenimine (PEI) HEK293 EBNA cells were cultivated in suspension in serum free CD CHO culture medium. For the production in 500 ml shake flasks, 400 million HEK293 EBNA cells were seeded 24 hours before transfection. For transfection cells were centrifuged for 5 min at 210×g, and supernatant was replaced by 20 ml pre-warmed CD CHO medium. Expression vectors were mixed in 20 ml CD CHO medium to a final amount of 200 μg DNA. After addition of 540 μl PEI, the mixture was vortexed for 15 s and subsequently incubated for 10 min at room temperature. Afterwards cells were mixed with the DNA/PEI solution, transferred to a 500 ml shake flask and incubated for 3 hours at 37° C. in an incubator with a 5% CO₂ atmosphere. After the incubation time 160 ml F17 medium was added and cells were cultivated for 24 hours. One day after transfection 1 mM valproic acid and 7% Feed 1 (Lonza) were added. After a cultivation of 7 days, supernatant was collected for purification by centrifugation for 15 min at 210×g, the solution was sterile filtered (0.22 μm filter), supplemented with sodium azide to a final concentration of 0.01% w/v, and kept at 4° C.

[0377] The secreted proteins were purified from cell culture supernatants by Protein A affinity chromatography, followed by a size exclusion chromatography step.

[0378] For affinity chromatography supernatant was loaded on a HiTrap Protein A HP column (CV=5 ml, GE Healthcare) equilibrated with 25 ml 20 mM sodium phosphate, 20 mM sodium citrate, pH 7.5 or 40 ml 20 mM sodium phosphate, 20 mM sodium citrate, 0.5 M sodium chloride, pH 7.5. Unbound protein was removed by washing with at least ten column volumes 20 mM sodium phosphate, 20 mM sodium citrate, 0.5 M sodium chloride pH 7.5, followed by an additional wash step using six column volumes 10 mM sodium phosphate, 20 mM sodium citrate, 0.5 M sodium chloride pH 5.45. Subsequently, the column was washed with 20 ml 10 mM MES, 100 mM sodium chloride, pH 5.0, and target protein was eluted in six column volumes 20 mM sodium citrate, 100 mM sodium chloride, 100 mM glycine, pH 3.0. Alternatively, target protein was eluted using a gradient over 20 column volumes from 20 mM sodium citrate, 0.5 M sodium chloride, pH 7.5 to 20 mM sodium citrate, 0.5 M sodium chloride, pH 2.5. The protein solution was neutralized by adding 1/10 of 0.5 M sodium phosphate, pH 8. The target protein was concentrated and filtrated prior to loading on a HiLoad Superdex 200 column (GE Healthcare) equilibrated with 25 mM potassium phosphate, 125 mM sodium chloride, 100 mM glycine solution of pH 6.7. For the purification of 1+1 IgG Crossfab the column was equilibrated with 20 mM histidine, 140 mM sodium chloride solution of pH 6.0.

[0379] The protein concentration of purified protein samples was determined by measuring the optical density (OD) at 280 nm, using the molar extinction coefficient calculated on the basis of the amino acid sequence. Purity and molecular weight of the bispecific constructs were analyzed by SDS-PAGE in the presence and absence of a reducing agent (5 mM 1,4-dithiotreitol) and staining with Coomassie (SimpleBlue™ SafeStain from Invitrogen) using the NuPAGE® Pre-Cast gel system (Invitrogen, USA) was used according to the manufacturer's instructions (4-12% Tris-Acetate gels or 4-12% Bis-Tris). Alternatively, purity and molecular weight of molecules were analyzed by CE-SDS analyses in the presence and absence of a reducing agent, using the Caliper LabChip GXII system (Caliper Lifescience) according to the manufacturer's instructions.

[0380] The aggregate content of the protein samples was analyzed using a Superdex 200 10/300GL analytical size-exclusion chromatography column (GE Healthcare) in 2 mM MOPS, 150 mM NaCl, 0.02% (w/v) NaN₃, pH 7.3 running buffer at 25° C. Alternatively, the aggregate content of antibody samples was analyzed using a TSKgel G3000 SW XL analytical size-exclusion column (Tosoh) in 25 mM K₂HPO₄, 125 mM NaCl, 200 mM L-arginine monohydrocloride, 0.02% (w/v) NaN₃, pH 6.7 running buffer at 25° C.

[0381] FIGS. 2-14 show the results of the SDS PAGE and analytical size exclusion chromatography and Table 2A shows the yields, aggregate content after Protein A, and final monomer content of the preparations of the different bispecific constructs.

[0382] FIG. 47 shows the result of the CE-SDS analyses of the anti-CD3/anti-MCSP bispecific “2+1 IgG Crossfab, linked light chain” construct (see SEQ ID NOs 3, 5, 29 and 179). 2 μg sample was used for analyses. FIG. 48 shows the result of the analytical size exclusion chromatography of the final product (20 μg sample injected).

[0383] FIG. 54 shows the results of the CE-SDS and SDS PAGE analyses of various constructs, and Table 2A shows the yields, aggregate content after Protein A and final monomer content of the preparations of the different bispecific constructs.

TABLE 2A
Yields, aggregate content after Protein A and final monomer content.

| | | Aggre- | | | |
|---|---|---|---|---|---|
| | | gate | | | |
| | | content | | | |
| | | after | | | Mon- |
| | Yield | Protein | HMW | LMW | omer |
| Construct | [mg/l] | A [%] | [%] | [%] | [%] |
| MCSP | | | | | |
| 2 + 1 IgG Crossfab; VH/VL | 12.8 | 2.2 | 0 | 0 | 100 |
| exchange (LC007/V9) | | | | | |
| (SEQ ID NOs 3, 5, 29, 33) | | | | | |
| 2 + 1 IgG Crossfab; VH/VL | 3.2 | 5.7 | 0.4 | 0 | 99.6 |
| exchange (LC007/FN18) | | | | | |
| (SEQ ID NOs 3, 5, 35, 37) | | | | | |
| 2 + 1 IgG scFab, P329G | 11.9 | 23 | 0.3 | 0 | 99.7 |
| LALA (SEQ ID NOs 5, | | | | | |
| 21, 23) | | | | | |
| 2 + 1 IgG scFab, LALA | 9 | 23 | 0 | 0 | 100 |
| (SEQ ID NOs 5, 17, 19) | | | | | |
| 2 + 1 IgG scFab, P329G | 12.9 | 32.7 | 0 | 0 | 100 |
| LALA N297D (SEQ ID | | | | | |
| NOs 5, 25, 27) | | | | | |
| 2 + 1 IgG scFab, wt | 15.5 | 31.8 | 0 | 0 | 100 |
| (SEQ ID NOs 5, 13, 15) | | | | | |
| 1 + 1 IgG scFab | 7 | 24.5 | 0 | 0 | 100 |
| (SEQ ID NOs 5, 21, 213) | | | | | |
| 1 + 1 IgG scFab “one armed” | 7.6 | 43.7 | 2.3 | 0 | 97.7 |
| (SEQ ID NOs 1, 3, 5) | | | | | |
| 1 + 1 IgG scFab “one armed | 1 | 27 | 7.1 | 9.1 | 83.8 |
| inverted” (SEQ ID NOs 7, | | | | | |
| 9, 11) | | | | | |
| 1 + 1 IgG Crossfab; VH/VL | 9.8 | 0 | 0 | 0 | 100 |
| exchange (LC007/V9) | | | | | |
| (SEQ ID NOs 5, 29, 31, 33) | | | | | |
| 2 + 1 IgG Crossfab, linked | 0.54 | 40 | 1.4 | 0 | 98.6 |
| light chain; VL/VH | | | | | |
| exchange (LC007/V9) | | | | | |
| (SEQ ID NOs 3, 5, 29, 179) | | | | | |
| 1 + 1 IgG Crossfab; VL/VH | 6.61 | 8.5 | 0 | 0 | 100 |
| exchange (LC007/V9) | | | | | |
| (SEQ ID NOs 5, 29, | | | | | |
| 33, 181) | | | | | |
| 1 + 1 CrossMab; CL/CH1 | 6.91 | 10.5 | 1.3 | 1.7 | 97 |
| exchange (LC00/V9) | | | | | |
| (SEQ ID NOs 5, 23, | | | | | |
| 183, 185) | | | | | |
| 2 + 1 IgG Crossfab, inverted; | 9.45 | 6.1 | 0.8 | 0 | 99.2 |
| CL/CH1 exchange | | | | | |
| (LC007/V9) | | | | | |
| (SEQ ID NOs 5, 23, | | | | | |
| 183, 187) | | | | | |
| 2 + 1 IgG Crossfab; VL/VH | 36.6 | 0 | 9.5 | 35.3 | 55.2 |
| exchange (M4-3 ML2/V9) | | | | | |
| (SEQ ID NOs 33, 189, | | | | | |
| 191, 193) | | | | | |
| 2 + 1 IgG Crossfab; CL/CH1 | 2.62 | 12 | 2.8 | 0 | 97.2 |
| exchange (M4-3 ML2/V9) | | | | | |
| (SEQ ID NOs 183, 189, | | | | | |
| 193, 195) | | | | | |
| 2 + 1 IgG Crossfab; CL/CH1 | 29.75 | 0 | 0 | 0 | 100 |
| exchange (M4-3 ML2/H2C) | | | | | |
| (SEQ ID NOs 189, 193, | | | | | |
| 199, 201) | | | | | |
| 2 + 1 IgG Crossfab; | 1.2 | 0 | 1.25 | 1.65 | 97.1 |
| CL/CH1 exchange | | | | | |
| (LC007/anti-CD3) | | | | | |
| (SEQ ID NOs 5, 23, | | | | | |
| 215, 217) | | | | | |
| 2 + 1 IgG Crossfab, | 7.82 | 0.5 | 0 | 0 | 100 |
| inverted; CL/CH1 | | | | | |
| exchange (LC007/ | | | | | |
| anti-CD3) | | | | | |
| (SEQ ID NOs 5, 23, | | | | | |
| 215, 219) | | | | | |
| EGFR | | | | | |
| 2 + 1 IgG scFab | 5.2 | 53 | 0 | 30 | 70 |
| (SEQ ID NOs 45, 47, 53) | | | | | |
| 1 + 1 IgG scFab | 3.4 | 66.6 | 0 | 1.6 | 98.4 |
| (SEQ ID NOs 47, 53, 213) | | | | | |
| 1 + 1 IgG scFab “one armed” | 9.05 | 60.8 | 0 | 0 | 100 |
| (SEQ ID NOs 43, 45, 47) | | | | | |
| 1 + 1 IgG scFab “one armed | 3.87 | 58.8 | 0 | 0 | 100 |
| inverted” (SEQ ID NOs 11, | | | | | |
| 49, 51) | | | | | |
| FAP | | | | | |
| 2 + 1 IgG scFab | 12.57 | 53 | 0 | 0 | 100 |
| (SEQ ID NOs 57, 59, 61) | | | | | |
| 1 + 1 IgG scFab | 17.95 | 41 | 0.4 | 0 | 99.6 |
| (SEQ ID NOs 57, 61, 213) | | | | | |
| 1 + 1 IgG scFab “one armed | 2.44 | 69 | 0.6 | 0 | 99.4 |
| inverted” (SEQ ID NOs 11, | | | | | |
| 51, 55) | | | | | |
| CEA | | | | | |
| 2 + 1 IgG Crossfab, inverted; | 0.34 | 13 | 4.4 | 0 | 95.6 |
| VL/VH exchange | | | | | |
| (CH1A1A/V9) | | | | | |
| (SEQ ID NOs 33, 63, | | | | | |
| 65, 67) | | | | | |
| 2 + 1 IgG Crossfab, inverted; | 12.7 | 43 | 0 | 0 | 100 |
| CL/CH1 exchange | | | | | |
| (CH1A1A/V9) | | | | | |
| (SEQ ID NOs 65, 67, | | | | | |
| 183, 197) | | | | | |
| 2 + 1 IgG Crossfab, inverted; | 7.1 | 20 | 0 | 0 | 100 |
| CL/CH1 exchange | | | | | |
| (431/26/V9) | | | | | |
| (SEQ ID NOs 183, 203, | | | | | |
| 205, 207) | | | | | |
| 1 + 1 IgG-Crossfab light | 7.85 | 27 | 4.3 | 3.2 | 92.5 |
| chain fusion (CH1A1A/V9) | | | | | |
| (SEQ ID NOs 183, 209, | | | | | |
| 211, 213) | | | | | |

[0384] As controls, bispecific antigen binding molecules were generated in the prior art tandem scFv format (“(scFv)₂”) and by fusing a tandem scFv to an Fc domain (“(scFv)₂-Fc”). The molecules were produced in HEK293-EBNA cells and purified by Protein A affinity chromatography followed by a size exclusion chromatographic step in an analogous manner as described above for the bispecific antigen binding molecules of the invention. Due to high aggregate formation, some of the samples had to be further purified by applying eluted and concentrated samples from the HiLoad Superdex 200 column (GE Healthcare) to a Superdex 10/300 GL column (GE Healthcare) equilibrated with 20 mM histidine, 140 mM sodium chloride, pH 6.7 in order to obtain protein with high monomer content. Subsequently, protein concentration, purity and molecular weight, and aggregate content were determined as described above.

[0385] Yields, aggregate content after the first purification step, and final monomer content for the control molecules is shown in Table 2B. Comparison of the aggregate content after the first purification step (Protein A) indicates the superior stability of the IgG Crossfab and IgG scFab constructs compared to the “(scFv)₂-Fc” and the disulfide bridge-stabilized “(dsscFv)₂-Fc” molecules.

TABLE 2B
Yields, aggregate content after Protein A and final monomer content.

| | | Aggregates | | | |
|---|---|---|---|---|---|
| | | after | Final | | |
| | Yield | Protein | HMW | LMW | Monomer |
| Construct | [mg/l] | A [%] | [%] | [%] | [%] |
| (scFv)₂-Fc | 76.5 | 40 | 0.5 | 0 | 99.5 |
| (antiMCSP/anti huCD3) | | | | | |
| (dsscFv)₂-Fc | 2.65 | 48 | 7.3 | 8.0 | 84.7 |
| (antiMCSP/anti huCD3) | | | | | |

[0386] Thermal stability of the proteins was monitored by Dynamic Light Scattering (DLS). 30·g of filtered protein sample with a protein concentration of 1 mg/ml was applied in duplicate to a Dynapro plate reader (Wyatt Technology Corporation; USA). The temperature was ramped from 25 to 75° C. at 0.05° C./min, with the radius and total scattering intensity being collected. The results are shown in FIG. 15 and Table 2C. For the “(scFv)2-Fc” (antiMCSP/anti huCD3) molecule two aggregation points were observed, at 49° C. and 68° C. The “(dsscFv)₂-Fc” construct has an increased aggregation temperature (57° C.) as a result of the introduced disulfide bridge (FIG. 15A, Table 2C). Both, the “2+1 IgG scFab” and the “2+1 IgG Crossfab” constructs are aggregating at temperatures higher than 60° C., demonstrating their superior thermal stability as compared to the “(scFv)₂-Fc” and “(dsscFv)₂-Fc” formats (FIG. 15B, Table 2C).

TABLE 2C
Thermal stability determined by
dynamic light scattering.

| Construct | T_{agg} [° C.] |
|---|---|
| 2 + 1 IgG scFab (LC007/V9) | 68 |
| 2 + 1 IgG Crossfab (LC007/V9) | 65 |
| Fc-(scFv)2 (LC007/V9) | 49/68 |
| Fc-(dsscFv)2 (LC007/V9) | 57 |

### Example 2

### Surface Plasmon Resonance Analysis of Fc Receptor and Target Antigen Binding

### Method

[0387] All surface plasmon resonance (SPR) experiments are performed on a Biacore T100 at 25° C. with HBS-EP as running buffer (0.01 M HEPES pH 7.4, 0.15 M NaCl, 3 mM EDTA, 0.005% Surfactant P20, Biacore, Freiburg/Germany).

### Analysis of FcR Binding of Different Fc-Variants

[0388] The assay setup is shown in FIG. 16A. For analyzing interaction of different Fc-variants with human FcγRIIIa-V158 and murine FcγRIV direct coupling of around 6,500 resonance units (RU) of the anti-Penta His antibody (Qiagen) is performed on a CM5 chip at pH 5.0 using the standard amine coupling kit (Biacore, Freiburg/Germany). HuFcγRIIIa-V158-K6H6 and muFcγRIV-aviHis-biotin are captured for 60 s at 4 and 10 nM respectively.

[0389] Constructs with different Fc-mutations are passed through the flow cells for 120 s at a concentration of 1000 nM with a flow rate of 30 μl/min. The dissociation is monitored for 220 s. Bulk refractive index differences are corrected for by subtracting the response obtained in a reference flow cell. Here, the Fc-variants are flown over a surface with immobilized anti-Penta His antibody but on which HBS-EP has been injected rather than HuFcγRIIIa-V158-K6H6 or muFcγRIV-aviHis-biotin. Affinity for human FcγRIIIa-V158 and murine FcγRIV was determined for wild-type Fc using a concentration range from 500-4000 nM.

[0390] The steady state response was used to derive the dissociation constant K_{D} by non-linear curve fitting of the Langmuir binding isotherm. Kinetic constants were derived using the Biacore T100 Evaluation Software (vAA, Biacore AB, Uppsala/Sweden), to fit rate equations for 1:1 Langmuir binding by numerical integration.

### Result

[0391] The interaction of Fc variants with human FcγRIIIa and murine FcγRIV was monitored by surface plasmon resonance. Binding to captured huFcγRIIIa-V158-K6H6 and muFcγRIV-aviHis-biotin is significantly reduced for all analyzed Fc mutants as compared to the construct with a wild-type (wt) Fc domain.

[0392] The Fc mutants with the lowest binding to the human Fcγ-receptor were P329G L234A L235A (LALA) and P329G LALA N297D. The LALA mutation alone was not enough to abrogate binding to huFcγRIIIa-V158-K6H6. The Fc variant carrying only the LALA mutation had a residual binding affinity to human FcγRIIIa of 2.100 nM, while the wt Fc bound the human FcγRIIIa receptor with an affinity of 600 nM (Table 3). Both K_{D} values were derived by 1:1 binding model, using a single concentration.

[0393] Affinity to human FcγRIIIa-V158 and murine FcγRIV could only be analyzed for wt Fc. K_{D} values are listed in Table 3. Binding to the murine FcγRIV was almost completely eliminated for all analyzed Fc mutants.

TABLE 3
Affinity of Fc-variants to the human
FcγRIIIa-V158 and murine FcγRIV.

| | human | | murine | |
|---|---|---|---|---|
| K_{D} in nM | FcγRIIIa-V158 | | FcγRIV | |
| T = 25° C. | kinetic | steady state | kinetic | steady state |
| Fc-wt | 600* (1200) | 3470 | 576 | 1500 |
| (SEQ ID NOs 5, | | | | |
| 13, 15) | | | | |
| Fc-LALA | 2130* | n.d. | n.d. | |
| (SEQ ID NOs 5, | | | | |
| 17, 19) | | | | |
| Fc-P329G LALA | n.d. | | n.d. | |
| (SEQ ID NOs 5, | | | | |
| 21, 23) | | | | |
| Fc-P329G LALA | n.d. | | n.d. | |
| N297D (SEQ ID NOs | | | | |
| 5, 25, 27) | | | | |

*determined using one concentration (1000 nM)

### Analysis of Simultaneous Binding to Tumor Antigen and CD3

[0394] Analysis of simultaneous binding of the T-cell bispecific constructs to the tumor antigen and the human CD3c was performed by direct coupling of 1650 resonance units (RU) of biotinylated D3 domain of MCSP on a sensor chip SA using the standard coupling procedure. Human EGFR was immobilized using standard amino coupling procedure. 8000 RU were immobilized on a CM5 sensor chip at pH 5.5. The assay setup is shown in FIG. 16B.

[0395] Different T-cell bispecific constructs were captured for 60 s at 200 nM. Human CD3γ(G₄S)₅CD3ε-AcTev-Fc(knob)-Avi/Fc(hole) was subsequently passed at a concentration of 2000 nM and a flow rate of 40 μl/min for 60 s. Bulk refractive index differences were corrected for by subtracting the response obtained on a reference flow cell where the recombinant CD3c was flown over a surface with immobilized D3 domain of MCSP or EGFR without captured T-cell bispecific constructs.

### Result

[0396] Simultaneous binding to both tumor antigen and human CD3c was analyzed by surface plasmon resonance (FIG. 17, FIG. 18). All constructs were able to bind the tumor antigen and the CD3 simultaneously. For most of the constructs the binding level (RU) after injection of human CD3c was higher than the binding level achieved after injection of the construct alone reflecting that both tumor antigen and the human CD3c were bound to the construct.

### Example 3

### Binding of Bispecific Constructs to the Respective Target Antigen on Cells

[0397] Binding of the different bispecific constructs to CD3 on Jurkat cells (ATCC #TIB-152), and the respective tumor antigen on target cells, was determined by FACS. Briefly, cells were harvested, counted and checked for viability. 0.15-0.2 million cells per well (in PBS containing 0.1% BSA; 90 μl) were plated in a round-bottom 96-well plate and incubated with the indicated concentration of the bispecific constructs and corresponding IgG controls (10 μl) for 30 min at 4° C. For a better comparison, all constructs and IgG controls were normalized to same molarity. After the incubation, cells were centrifuged (5 min, 350×g), washed with 150 μl PBS containing 0.1% BSA, resuspended and incubated for further 30 min at 4° C. with 12 μl/well of a FITC- or PE-conjugated secondary antibody. Bound constructs were detected using a FACSCantoII (Software FACS Diva). The “(scFv)₂” molecule was detected using a FITC-conjugated anti-His antibody (Lucerna, #RHIS-45F-Z). For all other molecules, a FITC- or PE-conjugated AffiniPure F(ab′)2 Fragment goat anti-human IgG Fcγ Fragment Specific (Jackson Immuno Research Lab #109-096-098/working solution 1:20, or #109-116-170/working solution 1:80, respectively) was used. Cells were washed by addition of 120 μl/well PBS containing 0.1% BSA and centrifugation at 350×g for 5 min. A second washing step was performed with 150 μl/well PBS containing 0.1% BSA. Unless otherwise indicated, cells were fixed with 100 μl/well fixation buffer (BD #554655) for 15 min at 4° C. in the dark, centrifuged for 6 min at 400×g and kept in 200 μl/well PBS containing 0.1% BSA until the samples were measured with FACS CantoII. EC50 values were calculated using the GraphPad Prism software.

[0398] In a first experiment, different bispecific constructs targeting human MCSP and human CD3 were analyzed by flow cytometry for binding to human CD3 expressed on Jurkat, human T cell leukaemia cells, or to human MCSP on Colo-38 human melanoma cells.

[0399] Results are presented in FIG. 19-21, which show the mean fluorescence intensity of cells that were incubated with the bispecific molecule, control IgG, the secondary antibody only, or left untreated.

[0400] As shown in FIG. 19, for both antigen binding moieties of the “(scFv)₂” molecule, i.e. CD3 (FIG. 191A) and MCSP (FIG. 19B), a clear binding signal is observed compared to the control samples.

[0401] The “2+1 IgG scFab” molecule (SEQ ID NOs 5, 17, 19) shows good binding to huMCSP on Colo-38 cells (FIG. 20A). The CD3 moiety binds CD3 slightly better than the reference anti-human CD3 IgG (FIG. 20B).

[0402] As depicted in FIG. 21A, the two “1+1” constructs show comparable binding signals to human CD3 on cells. The reference anti-human CD3 IgG gives a slightly weaker signal. In addition, both constructs tested (“1+1 IgG scFab, one-armed” (SEQ ID NOs 1, 3, 5) and “1+1 IgG scFab, one-armed inverted” (SEQ ID NOs 7, 9, 11)) show comparable binding to human MCSP on cells (FIG. 21B). The binding signal obtained with the reference anti-human MCSP IgG is slightly weaker.

[0403] In another experiment, the purified “2+1 IgG scFab” bispecific construct (SEQ ID NOs 5, 17, 19) and the corresponding anti human MCSP IgG were analyzed by flow cytometry for dose-dependent binding to human MCSP on Colo-38 human melanoma cells, to determine whether the bispecific construct binds to MCSP via one or both of its “arms”. As depicted in FIG. 22, the “2+1 IgG scFab” construct shows the same binding pattern as the MCSP IgG.

[0404] In yet another experiment, the binding of CD3/CEA “2+1 IgG Crossfab, inverted” bispecific constructs with either a VL/VH (see SEQ ID NOs 33, 63, 65, 67) or a CL/CH1 exchange (see SEQ ID NOs 66, 67, 183, 197) in the Crossfab fragment to human CD3, expressed by Jurkat cells, or to human CEA, expressed by LS-174T cells, was assessed. As a control, the equivalent maximum concentration of the corresponding IgGs and the background staining due to the labeled 2ndary antibody (goat anti-human FITC-conjugated AffiniPure F(ab′)2 Fragment, FcγFragment-specific, Jackson Immuno Research Lab #109-096-098) were assessed as well. As illustrated in FIG. 55, both constructs show good binding to human CEA, as well as to human CD3 on cells. The calculated EC50 values were 4.6 and 3.9 nM (CD3), and 9.3 and 6.7 nM (CEA) for the “2+1 IgG Crossfab, inverted (VL/VH)” and the “2+1 IgG Crossfab, inverted (CL/CH1)” constructs, respectively.

[0405] In another experiment, the binding of CD3/MCSP “2+1 IgG Crossfab” (see SEQ ID NOs 3, 5, 29, 33) and “2+1 IgG Crossfab, inverted” (see SEQ ID NOs 5, 23, 183, 187) constructs to human

[0406] CD3, expressed by Jurkat cells, or to human MCSP, expressed by WM266-4 cells, was assessed. FIG. 56 shows that, while binding of both constructs to MCSP on cells was comparably good, the binding of the “inverted” construct to CD3 was reduced compared to the other construct. The calculated EC50 values were 6.1 and 1.66 nM (CD3), and 0.57 and 0.95 nM (MCSP) for the “2+1 IgG Crossfab, inverted” and the “2+1 IgG Crossfab” constructs, respectively.

[0407] In a further experiment, binding of the “1+1 IgG Crossfab light chain (LC) fusion” construct (SEQ ID NOs 183, 209, 211, 213) to human CD3, expressed by Jurkat cells, and to human CEA, expressed by LS-174T cells was determined. As a control, the equivalent maximum concentration of the corresponding anti-CD3 and anti-CEA IgGs and the background staining due to the labeled 2ndary antibody (goat anti-human FITC-conjugated AffiniPure F(ab′)2 Fragment, Fcγ Fragment-specific, Jackson Immuno Research Lab #109-096-098) were assessed as well. As depicted in FIG. 57, the binding of the “1+1 IgG Crossfab LC fusion” to CEA appears to be greatly reduced, whereas the binding to CD3 was at least comparable to the reference IgG.

[0408] In a final experiment, binding of the “2+1 IgG Crossfab” (SEQ ID NOs 5, 23, 215, 217) and the “2+1 IgG Crossfab, inverted” (SEQ ID NOs 5, 23, 215, 219) constructs to human CD3, expressed by Jurkat cells, and to human MCSP, expressed by WM266-4 tumor cells was determined. As depicted in FIG. 58 the binding to human CD3 was reduced for the “2+1 IgG Crossfab, inverted” compared to the other construct, but the binding to human MCSP was comparably good. The calculated EC50 values were 10.3 and 32.0 nM (CD3), and 3.1 and 3.4 nM (MCSP) for the “2+1 IgG Crossfab” and the “2+1 IgG Crossfab, inverted” construct, respectively.

### Example 4

### FACS Analysis of Surface Activation Markers on Primary Human T Cells Upon Engagement of Bispecific Constructs

[0409] The purified huMCSP-huCD3-targeting bispecific “2+1 IgG scFab” (SEQ ID NOs 5, 17, 19) and “(scFv)₂” molecules were tested by flow cytometry for their potential to up-regulate the early surface activation marker CD69, or the late activation marker CD25 on CD8⁺ T cells in the presence of human MCSP-expressing tumor cells.

[0410] Briefly, MCSP-positive Colo-38 cells were harvested with Cell Dissociation buffer, counted and checked for viability. Cells were adjusted to 0.3×10⁶ (viable) cells per ml in AIM-V medium, 100 μl of this cell suspension per well were pipetted into a round-bottom 96-well plate (as indicated). 50 μl of the (diluted) bispecific construct were added to the cell-containing wells to obtain a final concentration of 1 nM. Human PBMC effector cells were isolated from fresh blood of a healthy donor and adjusted to 6×10⁶ (viable) cells per ml in AIM-V medium. 50 μl of this cell suspension was added per well of the assay plate (see above) to obtain a final E:T ratio of 10:1. To analyze whether the bispecific constructs are able to activate T cells exclusively in the presence of target cells expressing the tumor antigen huMCSP, wells were included that contained 1 nM of the respective bispecific molecules, as well as PBMCs, but no target cells.

[0411] After incubation for 15 h (CD69), or 24 h (CD25) at 37° C., 5% CO₂, cells were centrifuged (5 min, 350×g) and washed twice with 150 μl/well PBS containing 0.1% BSA. Surface staining for CD8 (mouse IgG1, κ; clone HIT8a; BD #555635), CD69 (mouse IgG1; clone L78; BD #340560) and CD25 (mouse IgG1, κ; clone M-A251; BD #555434) was performed at 4° C. for 30 min, according to the supplier's suggestions. Cells were washed twice with 150 μl/well PBS containing 0.1% BSA and fixed for 15 min at 4° C., using 100 μl/well fixation buffer (BD #554655). After centrifugation, the samples were resuspended in 200 μl/well PBS with 0.1% BSA and analyzed using a FACS CantoII machine (Software FACS Diva).

[0412] FIG. 23 depicts the expression level of the early activation marker CD69 (A), or the late activation marker CD25 (B) on CD8⁺ T cells after 15 hours or 24 hours incubation, respectively. Both constructs induce up-regulation of both activation markers exclusively in the presence of target cells. The “(scFv)₂” molecule seems to be slightly more active in this assay than the “2+1 IgG scFab” construct.

[0413] The purified huMCSP-huCD3-targeting bispecific “2+1 IgG scFab” and “(scFv)₂” molecules were further tested by flow cytometry for their potential to up-regulate the late activation marker CD25 on CD8⁺ T cells or CD4⁺ T cells in the presence of human MCSP-expressing tumor cells. Experimental procedures were as described above, using human pan T effector cells at an E:T ratio of 5:1 and an incubation time of five days.

[0414] FIG. 24 shows that both constructs induce up-regulation of CD25 exclusively in the presence of target cells on both, CD8⁺ (A) as well as CD4⁺ (B) T cells. The “2+1 IgG scFab” construct seems to induce less up-regulation of CD25 in this assay, compared to the “(scFv)₂” molecule. In general, the up-regulation of CD25 is more pronounced on CD8⁺ than on CD4⁺ T cells.

[0415] In another experiment, purified “2+1 IgG Crossfab” targeting cynomolgus CD3 and human MCSP (SEQ ID NOs 3, 5, 35, 37) was analyzed for its potential to up-regulate the surface activation marker CD25 on CD8⁺ T cells in the presence of tumor target cells. Briefly, human MCSP-expressing MV-3 tumor target cells were harvested with Cell Dissociation Buffer, washed and resuspended in DMEM containing 2% FCS and 1% GlutaMax. 30 000 cells per well were plated in a round-bottom 96-well plate and the respective antibody dilution was added at the indicated concentrations (FIG. 25). The bispecific construct and the different IgG controls were adjusted to the same molarity. Cynomolgus PBMC effector cells, isolated from blood of two healthy animals, were added to obtain a final E:T ratio of 3:1. After an incubation for 43 h at 37° C., 5% CO₂, the cells were centrifuged at 350×g for 5 min and washed twice with PBS, containing 0.1% BSA. Surface staining for CD8 (Miltenyi Biotech #130-080-601) and CD25 (BD #557138) was performed according to the supplier's suggestions. Cells were washed twice with 150 μl/well PBS containing 0.1% BSA and fixed for 15 min at 4° C., using 100 μl/well fixation buffer (BD #554655). After centrifugation, the samples were resuspended in 200 μl/well PBS with 0.1% BSA and analyzed using a FACS CantoII machine (Software FACS Diva).

[0416] As depicted in FIG. 25, the bispecific construct induces concentration-dependent up-regulation of CD25 on CD8⁺ T cells only in the presence of target cells. The anti cyno CD3 IgG (clone FN-18) is also able to induce up-regulation of CD25 on CD8⁺ T cells, without being crosslinked (see data obtained with cyno Nestor). There is no hyperactivation of cyno T cells with the maximal concentration of the bispecific construct (in the absence of target cells).

[0417] In another experiment, the CD3-MCSP “2+1 IgG Crossfab, linked light chain” (see SEQ ID NOs 3, 5, 29, 179) was compared to the CD3-MCSP “2+1 IgG Crossfab” (see SEQ ID NOs 3, 5, 29, 33) for its potential to up-regulate the early activation marker CD69 or the late activation marker CD25 on CD8⁺ T cells in the presence of tumor target cells. Primary human PBMCs (isolated as described above) were incubated with the indicated concentrations of bispecific constructs for at least 22 h in the presence or absence of MCSP-positive Colo38 target cells. Briefly, 0.3 million primary human PBMCs were plated per well of a flat-bottom 96-well plate, containing the MCSP-positive target cells (or medium). The final effector to target cell (E:T) ratio was 10:1. The cells were incubated with the indicated concentration of the bispecific constructs and controls for the indicated incubation times at 37° C., 5% CO₂. The effector cells were stained for CD8, and CD69 or CD25 and analyzed by FACS CantoII.

[0418] FIG. 53 shows the result of this experiment. There were no significant differences detected for CD69 (A) or CD25 up-regulation (B) between the two 2+1 IgG Crossfab molecules (with or without the linked light chain).

[0419] In yet another experiment, the CD3/MCSP “2+1 IgG Crossfab” (see SEQ ID NOs 3, 5, 29, 33) and “1+1 IgG Crossfab” (see SEQ ID NOs 5, 29, 33, 181) constructs were compared to the “1+1 CrossMab” construct (see SEQ ID NOs 5, 23, 183, 185) for their potential to up-regulate CD69 or CD25 on CD4⁺ or CD8⁺ T cells in the presence of tumor target cells. The assay was performed as described above, in the presence of absence of human MCSP expressing MV-3 tumor cells, with an incubation time of 24 h.

[0420] As shown in FIG. 59, the “1+1 IgG Crossfab” and “2+1 IgG Crossfab” constructs induced more pronounced upregulation of activation markers than the “1+1 CrossMab” molecule.

[0421] In a final experiment, the CD3/MCSP “2+1 IgG Crossfab” (see SEQ ID NOs 5, 23, 215, 217) and “2+1 IgG Crossfab, inverted” (see SEQ ID NOs 5, 23, 215, 219) constructs were assessed for their potential to up-regulate CD25 on CD4⁺ or CD8⁺ T cells from two different cynomolgus monkeys in the presence of tumor target cells. The assay was performed as described above, in the presence of absence of human MCSP expressing MV-3 tumor cells, with an E:T ratio of 3:1 and an incubation time of about 41 h.

[0422] As shown in FIG. 60, both constructs were able to up-regulate CD25 on CD4⁺ and CD8⁺ T cells in a concentration-dependent manner, without significant difference between the two formats. Control samples without antibody and without target cells gave a comparable signal to the samples with antibody but no targets (not shown).

### Example 5

### Interferon-γ Secretion Upon Activation of Human Pan T Cells with CD3 Bispecific Constructs

[0423] Purified “2+1 IgG scFab” targeting human MCSP and human CD3 (SEQ ID NOs 5, 17, 19) was analyzed for its potential to induce T cell activation in the presence of human MCSP-positive U-87MG cells, measured by the release of human interferon (IFN)-γ into the supernatant. As controls, anti-human MCSP and anti-human CD3 IgGs were used, adjusted to the same molarity. Briefly, huMCSP-expressing U-87MG glioblastoma astrocytoma target cells (ECACC 89081402) were harvested with Cell Dissociation Buffer, washed and resuspended in AIM-V medium (Invitrogen #12055-091). 20 000 cells per well were plated in a round-bottom 96-well-plate and the respective antibody dilution was added to obtain a final concentration of 1 nM. Human pan T effector cells, isolated from Buffy Coat, were added to obtain a final E:T ratio of 5:1. After an overnight incubation of 18.5 h at 37° C., 5% CO₂, the assay plate was centrifuged for 5 min at 350×g and the supernatant was transferred into a fresh 96-well plate. Human IFN-γ levels in the supernatant were measured by ELISA, according to the manufacturer's instructions (BD OptEIA human IFN-γ ELISA Kit II from Becton Dickinson, #550612).

[0424] As depicted in FIG. 26, the reference IgGs show no to weak induction of IFN-γ secretion, whereas the “2+1 IgG scFab” construct is able to activate human T cells to secrete IFN-γ.

### Example 6

### Re-Directed T Cell Cytotoxicity Mediated by Cross-Linked Bispecific Constructs Targeting CD3 on T Cells and MCSP or EGFR on Tumor Cells (LDH Release Assay)

[0425] In a first series of experiments, bispecific constructs targeting CD3 and MCSP were analyzed for their potential to induce T cell-mediated apoptosis in tumor target cells upon crosslinkage of the construct via binding of the antigen binding moieties to their respective target antigens on cells (FIGS. 27-38).

[0426] In one experiment purified “2+1 IgG scFab” (SEQ ID NOs 5, 21, 23) and “2+1 IgG Crossfab” (SEQ ID NOs 3, 5, 29, 33) constructs targeting human CD3 and human MCSP, and the corresponding “(scFv)₂” molecule, were compared. Briefly, huMCSP-expressing MDA-MB-435 human melanoma target cells were harvested with Cell Dissociation Buffer, washed and resuspended in AIM-V medium (Invitrogen #12055-091). 30 000 cells per well were plated in a round-bottom 96-well plate and the respective dilution of the construct was added at the indicated concentration. All constructs and corresponding control IgGs were adjusted to the same molarity. Human pan T effector cells were added to obtain a final E:T ratio of 5:1. As a positive control for the activation of human pan T cells, 1 μg/ml PHA-M (Sigma #L8902; mixture of isolectins isolated from Phaseolus vulgaris) was used. For normalization, maximal lysis of the target cells (=100%) was determined by incubation of the target cells with a final concentration of 1% Triton X-100. Minimal lysis (=0%) refers to target cells co-incubated with effector cells, but without any construct or antibody. After an overnight incubation of 20 h at 37° C., 5% CO₂, LDH release of apoptotic/necrotic target cells into the supernatant was measured with the LDH detection kit (Roche Applied Science, #11 644 793 001), according to the manufacturer's instructions.

[0427] As depicted in FIG. 27, both “2+1” constructs induce apoptosis in target cells comparable to the “(scFv)₂” molecule.

[0428] Further, purified “2+1 IgG Crossfab” (SEQ ID NOs 3, 5, 29, 33) and “2+1 IgG scFab” constructs differing in their Fc domain, as well as the “(scFv)₂” molecule, were compared. The different mutations in the Fc domain (L234A+L235A (LALA), P329G and/or N297D, as indicated) reduce or abolish the (NK) effector cell function induced by constructs containing a wild-type (wt) Fc domain. Experimental procedures were as described above.

[0429] FIG. 28 shows that all constructs induce apoptosis in target cells comparable to the “(scFv)₂” molecule.

[0430] FIG. 29 shows the result of a comparison of the purified “2+1 IgG scFab” (SEQ ID NOs 5, 17, 19) and the “(scFv)₂” molecule for their potential to induce T cell-mediated apoptosis in tumor target cells. Experimental procedures were as described above, using huMCSP-expressing Colo-38 human melanoma target cells at an E:T ratio of 5:1, and an overnight incubation of 18.5 h. As depicted in the figure, the “2+1 IgG scFab” construct shows comparable cytotoxic activity to the “(scFv)₂” molecule.

[0431] Similarly, FIG. 30 shows the result of a comparison of the purified “2+1 IgG scFab” construct (SEQ ID NOs 5, 17, 19) and the “(scFv)₂” molecule, using huMCSP-expressing Colo-38 human melanoma target cells at an E:T ratio of 5:1 and an incubation time of 18 h. As depicted in the figure, the “2+1 IgG scFab” construct shows comparable cytotoxic activity to the (scFv)₂ molecule.

[0432] FIG. 31 shows the result of a comparison of the purified “2+1 IgG scFab” construct (SEQ ID NOs 5, 17, 19) and the “(scFv)₂” molecule, using huMCSP-expressing MDA-MB-435 human melanoma target cells at an E:T ratio of 5:1 and an overnight incubation of 23.5 h. As depicted in the figure, the construct induces apoptosis in target cells comparably to the “(scFv)₂” molecule. The “2+1 IgG scFab” construct shows reduced efficacy at the highest concentrations.

[0433] Furthermore, different bispecific constructs that are monovalent for both targets, human CD3 and human MCSP, as well as the corresponding “(scFv)₂” molecule were analyzed for their potential to induce T cell-mediated apoptosis. FIG. 32 shows the results for the “1+1 IgG scFab, one-armed” (SEQ ID NOs 1, 3, 5) and “1+1 IgG scFab, one-armed inverted” (SEQ ID NOs 7, 9, 11) constructs, using huMCSP-expressing Colo-38 human melanoma target cells at an E:T ratio of 5:1, and an incubation time of 19 h. As depicted in the figure, both “1+1” constructs are less active than the “(scFv)₂” molecule, with the “1+1 IgG scFab, one-armed” molecule being superior to the “1+1 IgG scFab, one-armed inverted” molecule in this assay.

[0434] FIG. 33 shows the results for the “1+1 IgG scFab” construct (SEQ ID NOs 5, 21, 213), using huMCSP-expressing Colo-38 human melanoma target cells at an E:T ratio of 5:1, and an incubation time of 20 h. As depicted in the figure, the “1+1 IgG scFab” construct is less cytotoxic than the “(scFv)₂” molecule.

[0435] In a further experiment the purified “2+1 IgG Crossfab” (SEQ ID NOs 3, 5, 29, 33), the “1+1 IgG Crossfab” (SEQ ID NOs 5, 29, 31, 33) and the “(scFv)₂” molecule were analyzed for their potential to induce T cell-mediated apoptosis in tumor target cells upon crosslinkage of the construct via binding of both target antigens, CD3 and MCSP, on cells. huMCSP-expressing MDA-MB-435 human melanoma cells were used as target cells, the E:T ratio was 5:1, and the incubation time 20 h. The results are shown in FIG. 34. The “2+1 IgG Crossfab” construct induces apoptosis in target cells comparably to the “(scFv)₂” molecule. The comparison of the mono- and bivalent “IgG Crossfab” formats clearly shows that the bivalent one is much more potent.

[0436] In yet another experiment, the purified “2+1 IgG Crossfab” (SEQ ID NOs 3, 5, 29, 33) construct was analyzed for its potential to induce T cell-mediated apoptosis in different (tumor) target cells. Briefly, MCSP-positive Colo-38 tumor target cells, mesenchymal stem cells (derived from bone marrow, Lonza #PT-2501 or adipose tissue, Invitrogen #R7788-115) or pericytes (from placenta; PromoCell #C-12980), as indicated, were harvested with Cell Dissociation Buffer, washed and resuspended in AIM-V medium (Invitrogen #12055-091). 30 000 cells per well were plated in a round-bottom 96-well plate and the respective antibody dilution was added at the indicated concentrations. Human PBMC effector cells isolated from fresh blood of a healthy donor were added to obtain a final E:T ratio of 25:1. After an incubation of 4 h at 37° C., 5% CO₂, LDH release of apoptotic/necrotic target cells into the supernatant was measured with the LDH detection kit (Roche Applied Science, #11 644 793 001), according to the manufacturer's instructions.

[0437] As depicted in FIG. 35, significant T-cell mediated cytotoxicity could be observed only with Colo-38 cells. This result is in line with Colo-38 cells expressing significant levels of MCSP, whereas mesenchymal stem cells and pericytes express MCSP only very weakly.

[0438] The purified “2+1 IgG scFab” (SEQ ID NOs 5, 17, 19) construct and the “(scFv)₂” molecule were also compared to a glycoengineered anti-human MCSP IgG antibody, having a reduced proportion of fucosylated N-glycans in its Fc domain (MCSP GlycoMab). For this experiment huMCSP-expressing Colo-38 human melanoma target cells and human PBMC effector cells were used, either at a fixed E:T ratio of 25:1 (FIG. 36A), or at different E:T ratios from 20:1 to 1:10 (FIG. 36B). The different molecules were used at the concentrations indicated in FIG. 36A, or at a fixed concentration of 1667 pM (FIG. 36B). Read-out was done after 21 h incubation. As depicted in FIGS. 36 A and B, both bispecific constructs show a higher potency than the MSCP GlycoMab.

[0439] In another experiment, purified “2+1 IgG Crossfab” targeting cynomolgus CD3 and human MCSP (SEQ ID NOs 3, 5, 35, 37) was analyzed. Briefly, human MCSP-expressing MV-3 tumor target cells were harvested with Cell Dissociation Buffer, washed and resuspended in DMEM containing 2% FCS and 1% GlutaMax. 30 000 cells per well were plated in a round-bottom 96-well plate and the respective dilution of construct or reference IgG was added at the concentrations indicated. The bispecific construct and the different IgG controls were adjusted to the same molarity. Cynomolgus PBMC effector cells, isolated from blood of healthy cynomolgus, were added to obtain a final E:T ratio of 3:1. After incubation for 24 h or 43 h at 37° C., 5% CO₂, LDH release of apoptotic/necrotic target cells into the supernatant was measured with the LDH detection kit (Roche Applied Science, #11 644 793 001), according to the manufacturer's instructions.

[0440] As depicted in FIG. 37, the bispecific construct induces concentration-dependent LDH release from target cells. The effect is stronger after 43 h than after 24 h. The anti-cynoCD3 IgG (clone FN-18) is also able to induce LDH release of target cells without being crosslinked.

[0441] FIG. 38 shows the result of a comparison of the purified “2+1 IgG Crossfab” (SEQ ID NOs 3, 5, 29, 33) and the “(scFv)₂” construct, using MCSP-expressing human melanoma cell line (MV-3) as target cells and human PBMCs as effector cells with an E:T ratio of 10:1 and an incubation time of 26 h. As depicted in the figure, the “2+1 IgG Crossfab” construct is more potent in terms of EC50 than the “(scFv)₂” molecule.

[0442] In a second series of experiments, bispecific constructs targeting CD3 and EGFR were analyzed for their potential to induce T cell-mediated apoptosis in tumor target cells upon crosslinkage of the construct via binding of the antigen binding moieties to their respective target antigens on cells (FIGS. 39-41).

[0443] In one experiment purified “2+1 IgG scFab” (SEQ ID NOs 45, 47, 53) and “1+1 IgG scFab” (SEQ ID NOs 47, 53, 213) constructs targeting CD3 and EGFR, and the corresponding “(scFv)₂” molecule, were compared. Briefly, human EGFR-expressing LS-174T tumor target cells were harvested with trypsin, washed and resuspended in AIM-V medium (Invitrogen #12055-091). 30 000 cells per well were plated in a round-bottom 96-well-plate and the respective antibody dilution was added at the indicated concentrations. All constructs and controls were adjusted to the same molarity. Human pan T effector cells were added to obtain a final E:T ratio of 5:1. As a positive control for the activation of human pan T cells, 1 μg/ml PHA-M (Sigma #L8902) was used. For normalization, maximal lysis of the target cells (=100%) was determined by incubation of the target cells with a final concentration of 1% Triton X-100. Minimal lysis (=0%) refers to target cells co-incubated with effector cells, but without any construct or antibody. After an overnight incubation of 18 h at 37° C., 5% CO₂, LDH release of apoptotic/necrotic target cells into the supernatant was measured with the LDH detection kit (Roche Applied Science, #11 644 793 001), according to the manufacturer's instructions.

[0444] As depicted in FIG. 39, the “2+1 IgG scFab” construct shows comparable cytotoxic activity to the “(scFv)₂” molecule, whereas the “1+1 IgG scFab” construct is less active.

[0445] In another experiment the purified “1+1 IgG scFab, one-armed” (SEQ ID NOs 43, 45, 47), “1+1 IgG scFab, one-armed inverted” (SEQ ID NOs 11, 49, 51), “1+1 IgG scFab” (SEQ ID NOs 47, 53, 213), and the “(scFv)₂” molecule were compared. Experimental conditions were as described above, except for the incubation time which was 21 h.

[0446] As depicted in FIG. 40, the “1+1 IgG scFab” construct shows a slightly lower cytotoxic activity than the “(scFv)₂” molecule in this assay. Both “1+1 IgG scFab, one-armed (inverted)” constructs are clearly less active than the “(scFv)₂” molecule.

[0447] In yet a further experiment the purified “1+1 IgG scFab, one-armed” (SEQ ID NO 43, 45, 47) and “1+1 IgG scFab, one-armed inverted” (SEQ ID NOs 11, 49, 51) constructs and the “(scFv)₂” molecule were compared. The incubation time in this experiment was 16 h, and the result is depicted in FIG. 41. Incubated with human pan T cells, both “1+1 IgG scFab, one-armed (inverted)” constructs are less active than the “(scFv)₂” molecule, but show concentration-dependent release of LDH from target cells (FIG. 41A). Upon co-cultivation of the LS-174T tumor cells with naive T cells isolated from PBMCs, the constructs had only a basal activity—the most active among them being the “(scFv)₂” molecule (FIG. 41B).

[0448] In a further experiment, purified “1+1 IgG scFab, one-armed inverted” (SEQ ID NOs 11, 51, 55), “1+1 IgG scFab” (57, 61, 213), and “2+1 IgG scFab” (57, 59, 61) targeting CD3 and Fibroblast Activation Protein (FAP), and the corresponding “(scFv)₂” molecule were analyzed for their potential to induce T cell-mediated apoptosis in human FAP-expressing fibroblasts GM05389 cells upon crosslinkage of the construct via binding of both targeting moieties to their respective target antigens on the cells. Briefly, human GM05389 target cells were harvested with trypsin on the day before, washed and resuspended in AIM-V medium (Invitrogen #12055-091). 30 000 cells per well were plated in a round-bottom 96-well plate and incubated overnight at 37° C., 5% CO₂ to allow the cells to recover and adhere. The next day, the cells were centrifuged, the supernatant was discarded and fresh medium, as well as the respective dilution of the constructs or reference IgGs was added at the indicated concentrations. All constructs and controls were adjusted to the same molarity. Human pan T effector cells were added to obtain a final E:T ratio of 5:1. As a positive control for the activation of human pan T cells, 5 μg/ml PHA-M (Sigma #L8902) was used. For normalization, maximal lysis of the target cells (=100%) was determined by incubation of the target cells with a final concentration of 1% Triton X-100.

[0449] Minimal lysis (=0%) refers to target cells co-incubated with effector cells, but without any construct or antibody. After an additional overnight incubation of 18 h at 37° C., 5% CO₂, LDH release of apoptotic/necrotic target cells into the supernatant was measured with the LDH detection kit (Roche Applied Science, #11 644 793 001), according to the manufacturer's instructions.

[0450] As depicted in FIG. 42, the “2+1 IgG scFab” construct shows comparable cytotoxic activity to the “(scFv)₂” molecule in terms of EC50 values. The “1+1 IgG scFab, one-armed inverted” construct is less active than the other constructs tested in this assay.

[0451] In another set of experiments, the CD3/MCSP “2+1 IgG Crossfab, linked light chain” (see SEQ ID NOs 3, 5, 29, 179) was compared to the CD3/MCSP “2+1 IgG Crossfab” (see SEQ ID NOs 3, 5, 29, 33). Briefly, target cells (human Colo-38, human MV-3 or WM266-4 melanoma cells) were harvested with Cell Dissociation Buffer on the day of the assay (or with trypsin one day before the assay was started), washed and resuspended in the appropriate cell culture medium (RPMI1640, including 2% FCS and 1% Glutamax). 20 000-30 000 cells per well were plated in a flat-bottom 96-well plate and the respective antibody dilution was added as indicated (triplicates). PBMCs as effector cells were added to obtain a final effector-to-target cell (E:T) ratio of 10:1. All constructs and controls were adjusted to the same molarity, incubation time was 22 h. Detection of LDH release and normalization was done as described above.

[0452] FIGS. 49 to 52 show the result of four assays performed with MV-3 melanoma cells (FIG. 49), Colo-38 cells (FIGS. 50 and 51) or WM266-4 cells (FIG. 52). As shown in FIG. 49, the construct with the linked light chain was less potent compared to the one without the linked light chain in the assay with MV-3 cells as target cells. As shown in FIGS. 50 and 51, the construct with the linked light chain was more potent compared to the one without the linked light chain in the assays with high MCSP expressing Colo-38 cells as target cells. Finally, as shown in FIG. 52, there was no significant difference between the two constructs when high MCSP-expressing WM266-4 cells were used as target cells.

[0453] In another experiment, two CEA-targeting “2+1 IgG Crossfab, inverted” constructs were compared, wherein in the Crossfab fragment either the V regions (VL/VH, see SEQ ID NOs 33, 63, 65, 67) or the C regions (CL/CH1, see SEQ ID NOs 65, 67, 183, 197) were exchanged. The assay was performed as described above, using human PBMCs as effector cells and human CEA-expressing target cells. Target cells (MKN-45 or LS-174T tumor cells) were harvested with trypsin-EDTA (LuBiosciences #25300-096), washed and resuspended in RPMI1640 (Invitrogen #42404042), including 1% Glutamax (LuBiosciences #35050087) and 2% FCS. 30 000 cells per well were plated in a round-bottom 96-well plate and the bispecific constructs were added at the indicated concentrations. All constructs and controls were adjusted to the same molarity. Human PBMC effector cells were added to obtain a final E:T ratio of 10:1, incubation time was 28 h. EC50 values were calculated using the GraphPad Prism 5 software.

[0454] As shown in FIG. 61, the construct with the CL/CH1 exchange shows slightly better activity on both target cell lines than the construct with the VL/VH exchange. Calculated EC50 values were 115 and 243 pM on MKN-45 cells, and 673 and 955 pM on LS-174T cells, for the CL/CH1-exchange construct and the VL/VH-exchange construct, respectively.

[0455] Similarly, two MCSP-targeting “2+1 IgG Crossfab” constructs were compared, wherein in the Crossfab fragment either the V regions (VL/VH, see SEQ ID NOs 33, 189, 191, 193) or the C regions (CL/CH1, see SEQ ID NOs 183, 189, 193, 195) were exchanged. The assay was performed as described above, using human PBMCs as effector cells and human MCSP-expressing target cells. Target cells (WM266-4) were harvested with Cell Dissociation Buffer (LuBiosciences #13151014), washed and resuspended in RPMI1640 (Invitrogen #42404042), including 1% Glutamax (LuBiosciences #35050087) and 2% FCS. 30 000 cells per well were plated in a round-bottom 96-well plate and the constructs were added at the indicated concentrations. All constructs and controls were adjusted to the same molarity. Human PBMC effector cells were added to obtain a final E:T ratio of 10:1, incubation time was 26 h. EC50 values were calculated using the GraphPad Prism 5 software.

[0456] As depicted in FIG. 62, the two constructs show comparable activity, the construct with the CL/CH1 exchange having a slightly lower EC50 value (12.9 pM for the CL/CH1-exchange construct, compared to 16.8 pM for the VL/VH-exchange construct).

[0457] FIG. 63 shows the result of a similar assay, performed with human MCSP-expressing MV-3 target cells. Again, both constructs show comparable activity, the construct with the CL/CH1 exchange having a slightly lower EC50 value (approximately 11.7 pM for the CL/CH1-exchange construct, compared to approximately 82.2 pM for the VL/VH-exchange construct). Exact EC50 values could not be calculated, since the killing curves did not reach a plateau at high concentrations of the compounds.

[0458] In a further experiment, the CD3/MCSP “2+1 IgG Crossfab” (see SEQ ID NOs 3, 5, 29, 33) and “1+1 IgG Crossfab” (see SEQ ID NOs 5, 29, 33, 181) constructs were compared to the CD3/MCSP “1+1 CrossMab” (see SEQ ID NOs 5, 23, 183, 185). The assay was performed as described above, using human PBMCs as effector cells and WM266-4 or MV-3 target cells (E:T ratio=10:1) and an incubation time of 21 h.

[0459] As shown in FIG. 64, the “2+1 IgG Crossfab” construct is the most potent molecule in this assay, followed by the “1+1 IgG Crossfab” and the “1+1 CrossMab”. This ranking is even more pronounced with MV-3 cells, expressing medium levels of MCSP, compared to high MCSP expressing WM266-4 cells. The calculated EC50 values on MV-3 cells were 9.2, 40.9 and 88.4 pM, on WM266-4 cells 33.1, 28.4 and 53.9 pM, for the “2+1 IgG Crossfab”, the “1+1 IgG Crossfab” and the “1+1 CrossMab”, respectively.

[0460] In a further experiment, different concentrations of the “1+1 IgG Crossfab LC fusion” construct (SEQ ID NOs 183, 209, 211, 213) were tested, using MKN-45 or LS-174T tumor target cells and human PBMC effector cells at an E:T ratio of 10:1 and an incubation time of 28 hours. As shown in FIG. 65, the “1+1 IgG Crossfab LC fusion” construct induced apoptosis in MKN-45 target cells with a calculated EC50 of 213 pM, whereas the calculated EC50 is 1.56 nM with LS-174T cells, showing the influence of the different tumor antigen expression levels on the potency of the bispecific constructs within a certain period of time.

[0461] In yet another experiment, the “1+1 IgG Crossfab LC fusion” construct (SEQ ID NOs 183, 209, 211, 213) was compared to a untargeted “2+1 IgG Crossfab” molecule. MC38-huCEA tumor cells and human PBMCs (E:T ratio=10:1) and an incubation time of 24 hours were used. As shown in FIG. 66, the “1+1 IgG Crossfab LC fusion” construct induced apoptosis of target cells in a concentration-dependent manner, with a calculated EC50 value of approximately 3.2 nM. In contrast, the untargeted “2+1 IgG Crossfab” showed antigen-independent T cell-mediated killing of target cells only at the highest concentration.

[0462] In a final experiment, the “2+1 IgG Crossfab (V9)” (SEQ ID NOs 3, 5, 29, 33), the “2+1 IgG Crossfab, inverted (V9)” (SEQ ID NOs 5, 23, 183, 187), the “2+1 IgG Crossfab (anti-CD3)” (SEQ ID NOs 5, 23, 215, 217), the “2+1 IgG Crossfab, inverted (anti-CD3)” (SEQ ID NOs 5, 23, 215, 219) were compared, using human MCSP-positive MV-3 or WM266-4 tumor cells and human PBMCs (E:T ratio=10:1), and an incubation time of about 24 hours. As depicted in FIG. 67, the T cell-mediated killing of the “2+1 IgG Crossfab, inverted” constructs seems to be slightly stronger or at least equal to the one induced by the “2+1 IgG Crossfabt” constructs for both CD3 binders. The calculated EC50 values were as follows:

| | 2 + 1 IgG Crossfab | 2 + 1 IgG Crossfab | 2 + 1 IgG Crossfab | 2 + 1 IgG Crossfab, |
|---|---|---|---|---|
| EC50 [pM] | (V9) | inverted (V9) | (anti-CD3) | inverted (anti-CD3) |
| MV-3 | 10.0 | 4.1 | 11.0 | 3.0 |
| WM266-4 | 12.4 | 3.7 | 11.3 | 7.1 |

### Example 7

### CD107a/b Assay

[0463] Purified “2+1 IgG scFab” construct (SEQ ID NOs 5, 17, 19) and the “(scFv)₂” molecule, both targeting human MCSP and human CD3, were tested by flow cytometry for their potential to up-regulate CD107a and intracellular perforin levels in the presence or absence of human MCSP-expressing tumor cells.

[0464] Briefly, on day one, 30 000 Colo-38 tumor target cells per well were plated in a round-bottom 96-well plate and incubated overnight at 37° C., 5% CO₂ to let them adhere. Primary human pan T cells were isolated on day 1 or day 2 from Buffy Coat, as described.

[0465] On day two, 0.15 million effector cells per well were added to obtain a final E:T ratio of 5:1. FITC-conjugated CD107a/b antibodies, as well as the different bispecific constructs and controls are added. The different bispecific molecules and antibodies were adjusted to same molarities to obtain a final concentration of 9.43 nM. Following a 1 h incubation step at 37° C., 5% CO₂, monensin was added to inhibit secretion, but also to neutralize the pH within endosomes and lysosomes. After an additional incubation time of 5 h, cells were stained at 4° C. for 30 min for surface CD8 expression. Cells were washed with staining buffer (PBS/0.1% BSA), fixed and permeabilized for 20 min using the BD Cytofix/Cytoperm Plus Kit with BD Golgi Stop (BD Biosciences #554715). Cells were washed twice using 1×BD Perm/Wash buffer, and intracellular staining for perforin was performed at 4° C. for 30 min. After a final washing step with 1×BD Perm/Wash buffer, cells were resuspended in PBS/0.1% BSA and analyzed on FACS CantoII (all antibodies were purchased from BD Biosciences or BioLegend).

[0466] Gates were set either on all CD107a/b positive, perforin-positive or double-positive cells, as indicated (FIG. 43). The “2+1 IgG scFab” construct was able to activate T cells and up-regulate CD107a/b and intracellular perforin levels only in the presence of target cells (FIG. 43A), whereas the “(scFv)₂” molecule shows (weak) induction of activation of T cells also in the absence of target cells (FIG. 43B). The bivalent reference anti-CD3 IgG results in a lower level of activation compared to the “(scFv)₂” molecule or the other bispecific construct.

### Example 8

### Proliferation Assay

[0467] The purified “2+1 IgG scFab” (SEQ ID NOs 5, 17, 19) and “(scFv)₂” molecules, both targeting human CD3 and human MCSP, were tested by flow cytometry for their potential to induce proliferation of CD8⁺ or CD4⁺ T cells in the presence and absence of human MCSP-expressing tumor cells.

[0468] Briefly, freshly isolated human pan T cells were adjusted to 1 million cells per ml in warm PBS and stained with 1 μM CFSE at room temperature for 10 minutes. The staining volume was doubled by addition of RPMI1640 medium, containing 10% FCS and 1% GlutaMax. After incubation at room temperature for further 20 min, the cells were washed three times with pre-warmed medium to remove remaining CFSE. MCSP-positive Colo-38 cells were harvested with Cell Dissociation buffer, counted and checked for viability. Cells were adjusted to 0.2×10⁶ (viable) cells per ml in AIM-V medium, 100 μl of this cell suspension were pipetted per well into a round-bottom 96-well plate (as indicated). 50 μl of the (diluted) bispecific constructs were added to the cell-containing wells to obtain a final concentration of 1 nM. CFSE-stained human pan T effector cells were adjusted to 2×10⁶ (viable) cells per ml in AIM-V medium. 50 μl of this cell suspension was added per well of the assay plate (see above) to obtain a final E:T ratio of 5:1. To analyze whether the bispecific constructs are able to activate T cells only in the presence of target cells, expressing the tumor antigen huMCSP, wells were included that contained 1 nM of the respective bispecific molecules as well as PBMCs, but no target cells. After incubation for five days at 37° C., 5% CO₂, cells were centrifuged (5 min, 350×g) and washed twice with 150 μl/well PBS, including 0.1% BSA. Surface staining for CD8 (mouse IgG1, κ; clone HIT8a; BD #555635), CD4 (mouse IgG1, κ; clone RPA-T4; BD #560649), or CD25 (mouse IgG1, κ; clone M-A251; BD #555434) was performed at 4° C. for 30 min, according to the supplier's suggestions. Cells were washed twice with 150 μl/well PBS containing 0.1% BSA, resuspended in 200 μl/well PBS with 0.1% BSA, and analyzed using a FACS CantoII machine (Software FACS Diva). The relative proliferation level was determined by setting a gate around the non-proliferating cells and using the cell number of this gate relative to the overall measured cell number as the reference.

[0469] FIG. 44 shows that all constructs induce proliferation of CD8⁺ T cells (A) or CD4⁺ T cells (B) only in the presence of target cells, comparably to the “(scFv)₂” molecule. In general, activated CD8⁺ T cells proliferate more than activated CD4⁺ T cells in this assay.

### Example 9

### Cytokine Release Assay

[0470] The purified “2+1 IgG scFab” construct (SEQ ID NOs 5, 17, 19) and the “(scFv)₂” molecule, both targeting human MCSP and human CD3, were analyzed for their ability to induce T cell-mediated de novo secretion of cytokines in the presence or absence of tumor target cells.

[0471] Briefly, human PBMCs were isolated from Buffy Coats and 0.3 million cells were plated per well into a round-bottom 96-well plate. Colo-38 tumor target cells, expressing human MCSP, were added to obtain a final E:T-ratio of 10:1. Bispecific constructs and IgG controls were added at 1 nM final concentration and the cells were incubated for 24 h at 37° C., 5% CO₂. The next day, the cells were centrifuged for 5 min at 350×g and the supernatant was transferred into a new deep-well 96-well-plate for the subsequent analysis. The CBA analysis was performed according to manufacturer's instructions for FACS CantoII, using the Human Th1/Th2 Cytokine Kit II (BD #551809).

[0472] FIG. 45 shows levels of the different cytokine measured in the supernatant. In the presence of target cells the main cytokine secreted upon T cell activation is IFN-γ. The “(scFv)₂” molecule induces a slightly higher level of IFN-γ than the “2+1 IgG scFab” construct. The same tendency might be found for human TNF, but the overall levels of this cytokine were much lower compared to IFN-γ. There was no significant secretion of Th2 cytokines (IL-10 and IL-4) upon activation of T cells in the presence (or absence) of target cells. In the absence of Colo-38 target cells, only very weak induction of TNF secretion was observed, which was highest in samples treated with the “(scFv)₂” molecule.

[0473] In a second experiment, the following purified bispecific constructs targeting human MCSP and human CD3 were analyzed: the “2+1 IgG Crossfab” construct (SEQ ID NOs 3, 5, 29, 33), the “(scFv)₂” molecule, as well as different “2+1 IgG scFab” molecules comprising either a wild-type or a mutated (LALA, P329G and/or N297D, as indicated) Fc domain. Briefly, 280 μl whole blood from a healthy donor were plated per well of a deep-well 96-well plate. 30 000 Colo-38 tumor target cells, expressing human MCSP, as well as the different bispecific constructs and IgG controls were added at 1 nM final concentration. The cells were incubated for 24 h at 37° C., 5% CO₂ and then centrifuged for 5 min at 350×g. The supernatant was transferred into a new deep-well 96-well-plate for the subsequent analysis. The CBA analysis was performed according to manufacturer's instructions for FACS CantoII, using the combination of the following CBA Flex Sets: human granzyme B (BD #560304), human IFN-γ Flex Set (BD #558269), human TNF Flex Set (BD #558273), human IL-10 Flex Set (BD #558274), human IL-6 Flex Set (BD #558276), human IL-4 Flex Set (BD #558272), human IL-2 Flex Set (BD #558270).

[0474] FIG. 46 shows the levels of the different cytokine measured in the supernatant. The main cytokine secreted in the presence of Colo-38 tumor cells was IL-6, followed by IFN-γ. In addition, also the levels of granzyme B strongly increased upon activation of T cells in the presence of target cells. In general, the “(scFv)₂” molecule induced higher levels of cytokine secretion in the presence of target cells (FIG. 46, A and B). There was no significant secretion of Th2 cytokines (IL-10 and IL-4) upon activation of T cells in the presence (or absence) of target cells.

[0475] In this assay, there was a weak secretion of IFN-γ, induced by different “2+1 IgG scFab” constructs, even in the absence of target cells (FIG. 46, C and D). Under these conditions, no significant differences could be observed between “2+1 IgG scFab” constructs with a wild-type or a mutated Fc domain.

### Example 10

### Affinity Maturation of Anti-MCSP Antibody M4-3/ML2

[0476] Affinity maturation was performed via the oligonucleotide-directed mutagenesis procedure. For this the heavy chain variant M4-3, and the light chain variant ML2 were cloned into a phagemid vector, similar to those described by Hoogenboom, (Hoogenboom et al., Nucleic Acids Res. 1991, 19, 4133-4137). Residues to be randomized were identified by first generating a 3D model of that antibody via classical homology modeling and then identifying the solvent accessible residues of the complementary determining regions (CDRs) of heavy and light chain. Oligonucleotides with randomization based on trinucleotide synthesis as shown in Table 4 were purchased from Ella Biotech (Munich, Germany). Three independent sublibraries were generated via classical PCR, and comprised randomization in CDR-H1 together with CDR-H2, or CDR-L1 together with CDR-L2. CDR-L3 was randomized in a separate approach. The DNA fragments of those libraries were cloned into the phagemid via restriction digest and ligation, and subsequently electroporated into TG1 bacteria.

### Library Selection

[0477] The antibody variants thus generated were displayed in a monovalent fashion from filamentous phage particles as fusions to the gene III product of M13 packaged within each particle. The phage-displayed variants were then screened for their biological activities (here: binding affinity) and candidates that have one or more improved activities were used for further development. Methods for making phage display libraries can be found in Lee et al., J. Mol. Biol. (2004) 340, 1073-1093.

[0478] Selections with all affinity maturation libraries were carried out in solution according to the following procedure: 1. binding of ˜1012 phagemid particles of each affinity maturation libraries to 100 nM biotinylated hu-MCSP(D3 domain)-avi-his (SEQ ID NO: 376) for 0.5 h in a total volume of 1 ml, 2. capture of biotinylated hu-MCSP(D3 domain)-avi-his and specifically bound phage particles by addition of 5.4×10⁷ streptavidin-coated magnetic beads for 10 min, 3. washing of beads using 5-10×1 ml PBS/Tween-20 and 5-10×1 ml PBS, 4. elution of phage particles by addition of 1 ml 100 mM TEA (triethylamine) for 10 min and neutralization by adding 500 μl 1M Tris/HCl pH 7.4 and 5. re-infection of exponentially growing E. coli TG1 bacteria, infection with helper phage VCSM13 and subsequent PEG/NaCl precipitation of phagemid particles to be used in subsequent selection rounds. Selections were carried out over 3-5 rounds using either constant or decreasing (from 10⁻⁷ M to 2×10⁻⁹ M) antigen concentrations. In round 2, capture of antigen-phage complexes was performed using neutravidin plates instead of streptavidin beads. Specific binders were identified by ELISA as follows: 100 μl of 10 nM biotinylated hu-MCSP(D3 domain)-avi-his per well were coated on neutravidin plates. Fab-containing bacterial supernatants were added and binding Fabs were detected via their Flag-tags by using an anti-Flag/HRP secondary antibody. ELISA-positive clones were bacterially expressed as soluble Fab fragments in 96-well format and supernatants were subjected to a kinetic screening experiment by SPR-analysis using ProteOn XPR36 (BioRad). Clones expressing Fabs with the highest affinity constants were identified and the corresponding phagemids were sequenced.

TABLE 4
(excluded were always Cys and Met. Lys was excluded on top in those cases where
the oligonucleotide was a reverse primer)

| Position | Randomization |
|---|---|
| Heavy chain | |
| CDR1 | |
| Ser31 | S (40%), rest (60%, 4% each) |
| Gly32 | G (40%), rest (60%, 4% each). |
| Tyr33 | Y (40%), rest (60%, 4% each) |
| Tyr34 | Y (40%), rest (60%, 4% each) |
| CDR2 | |
| Tyr50 | Y 40%, (F, W, L, A, I, 30%, 6% each), rest (30%, 2.5% each) |
| Thr52 | T (60%), rest (40%, 2.5% each) |
| Tyr53 | Y (40%), rest (60%, 3.8% each) |
| Asp54 | D (40%), rest (60%, 3.8% each) |
| Ser56 | S (40%), rest (60%, 3.8% each) |
| Light chain | |
| CDR1 | |
| Gln27 | Q (40%), (E, D, N, S, T, R, 40%, 6.7% each), rest (total 20%, 2.2% each) |
| Gly28 | G (40%), (N, T, S, Q, Y, D, E, 40%, 5.7% each), rest (20%, 2.5% each) |
| Asn31 | N (40%), (S, T, G, Q, Y, D, E, R, 50%, 6.3% each), rest (10%, 1.4% each) |
| Tyr32 | Y (40%), (W, S, R, 30%, 10% each), rest (30%, 2.3% each) |
| CDR2 | |
| Tyr50 | Y (70%), (E, R, K, A, Q, T, S, D, G, W, F, 30%, 2.7% each) |
| Thr51 | T (50%), (S, A, G, N, Q, V, 30%, 5% each), rest (20%, 2% each) |
| Ser52 | S (50%), rest (50%, 3.1% each) |
| Ser53 | S (40%), (N, T, Q, Y, D, E, I, 40%, 5.7% each), rest (20%, 2.2% each) |
| CDR3 | |
| Tyr91 | Y (50%), rest (50%, 3.1% each) |
| Ser92 | S (50%), (N, Q, T, A, G 25%, 5% each), rest (25%, 2.3% each) |
| Lys93 | K (50%), S (5%), T (5%), N (5%), rest (35%, 2.7% each) |
| Leu94 | L (50%), (Y, F, S, I, A, V, 30%, 5% each), rest (20%, 2% each) |
| Pro95 | P (50%), (S, A, 20%, 10% each), rest (30%, 2.1% each) |
| Trp96 | W 50%, (Y, R, L, 15%, 5% each), rest (35%, 2.5% each) |

[0479] FIG. 68 shows an alignment of affinity matured anti-MCSP clones compared to the non-matured parental clone (M4-3 ML2). Heavy chain randomization was performed only in the CDR1 and 2. Light chain randomization was performed in CDR1 and 2, and independently in CDR3.

[0480] During selection, a few mutations in the frameworks occurred like F71Y in clone G3 or Y87H in clone E10.

### Production and Purification of Human IgG₁

[0481] The variable region of heavy and light chain DNA sequences of the affinity matured variants were subcloned in frame with either the constant heavy chain or the constant light chain pre-inserted into the respective recipient mammalian expression vector. The antibody expression was driven by an MPSV promoter and carries a synthetic polyA signal sequence at the 3′ end of the CDS. In addition each vector contained an EBV OriP sequence.

[0482] The molecule was produced by co-transfecting HEK293-EBNA cells with the mammalian expression vectors using polyethylenimine (PEI). The cells were transfected with the corresponding expression vectors in a 1:1 ratio. For transfection HEK293 EBNA cells were cultivated in suspension serum-free in CD CHO culture medium. For the production in 500 ml shake flask, 400 million HEK293 EBNA cells were seeded 24 hours before transfection. For transfection cells were centrifuged for 5 min at 210×g, supernatant was replaced by pre-warmed 20 ml CD CHO medium. Expression vectors were mixed in 20 ml CD CHO medium to a final amount of 200 μg DNA. After addition of 540 μl PEI solution, the mixture was vortexed for 15 s and subsequently incubated for 10 min at room temperature. Afterwards cells were mixed with the DNA/PEI solution, transferred to a 500 ml shake flask and incubated for 3 hours at 37° C. in an incubator with a 5% CO₂ atmosphere. After incubation time 160 ml F17 medium was added and cells were cultivated for 24 hours. One day after transfection 1 mM valproic acid and 7% Feed 1 (Lonza) was added. After 7 days cultivation supernatant was collected for purification by centrifugation for 15 min at 210×g, the solution was sterile filtered (0.22 μm filter) and sodium azide in a final concentration of 0.01% w/v was added, and kept at 4° C.

[0483] The secreted protein was purified from cell culture supernatants by affinity chromatography using Protein A. Supernatant was loaded on a HiTrap Protein A HP column (CV=5 mL, GE Healthcare) equilibrated with 40 ml 20 mM sodium phosphate, 20 mM sodium citrate, 0.5 M sodium chloride, pH 7.5. Unbound protein was removed by washing with at least 10 column volumes 20 mM sodium phosphate, 20 mM sodium citrate, 0.5 M sodium chloride, pH 7.5. Target protein was eluted during a gradient over 20 column volumes from 20 mM sodium citrate, 0.5 M sodium chloride, pH 7.5 to 20 mM sodium citrate, 0.5 M sodium chloride, pH 2.5. Protein solution was neutralized by adding 1/10 of 0.5 M sodium phosphate, pH 8. Target protein was concentrated and filtrated prior loading on a HiLoad Superdex 200 column (GE Healthcare) equilibrated with 20 mM histidine, 140 mM sodium chloride solution of pH 6.0.

[0484] The protein concentration of purified protein samples was determined by measuring the optical density (OD) at 280 nm, using the molar extinction coefficient calculated on the basis of the amino acid sequence. Purity and molecular weight of molecules were analyzed by CE-SDS analyses in the presence and absence of a reducing agent. The Caliper LabChip GXII system (Caliper Life Sciences) was used according to the manufacturer's instruction. 2 μg sample was used for analyses. The aggregate content of antibody samples was analyzed using a TSKgel G3000 SW XL analytical size-exclusion column (Tosoh) in 25 mM K₂HPO₄, 125 mM NaCl, 200 mM L-arginine monohydrochloride, 0.02% (w/v) NaN₃, pH 6.7 running buffer at 25° C.

TABLE 5
Production and purification of affinity matured anti-MCSP IgGs

| | | HMW | LMW | Monomer |
|---|---|---|---|---|
| Construct | Yield [mg/l] | [%] | [%] | [%] |
| M4-3(C1) ML2(G3) | 43.9 | 0 | 0 | 100 |
| M4-3(C1) ML2(E10) | 59.5 | 0 | 0 | 100 |
| M4-3(C1) ML2(C5) | 68.9 | 0 | 0.8 | 99.2 |

### Affinity Determination

### ProteOn Analysis

[0485] K_{D} was measured by surface plasmon resonance using a ProteOn XPR36 machine (BioRad) at 25° C. with anti-human F(ab′)2 fragment specific capture antibody (Jackson ImmunoResearch #109-005-006) immobilized by amine coupling on CM5 chips and subsequent capture of Fabs from bacterial supernatant or from purified Fab preparations. Briefly, carboxymethylated dextran biosensor chips (CM5, GE Healthcare) were activated with N-ethyl-N′-(3-dimethylaminopropyl)-carbodiimide hydrochloride (EDC) and N-hydroxysuccinimide (NHS) according to the supplier's instructions. Anti-human F(ab′)2 fragment specific capture antibody was diluted with 10 mM sodium acetate, pH 5.0 at 50 μg/ml before injection at a flow rate of 10 μl/minute to achieve approximately up to 10.000 response units (RU) of coupled capture antibody. Following the injection of the capture antibody, 1 M ethanolamine is injected to block unreacted groups. For kinetics measurements, Fabs from bacterial supernatant or purified Fabs were injected at a flow rate of 10 μl/minute for 300 s and a dissociation of 300 s for capture baseline stabilization. Capture levels were in the range of 100-500 RU. In a subsequent step, human MCSP(D3 domain)-avi-his analyte was injected either as a single concentration or as a concentration series (depending of clone affinity in a range between 100 nM and 250 pM) diluted into HBS-EP+ (GE Healthcare, 10 mM HEPES, 150 mM NaCl, 3 mM EDTA, 0.05% Surfactant P20, pH 7.4) at 25° C. at a flow rate of 50 μl/min. The surface of the sensorchip was regenerated by injection of glycine pH 1.5 for 30 s at 90 μl/min followed by injection of NaOH for 20 s at the same flow rate. Association rates (kₒₙ) and dissociation rates (k_{off}) were calculated using a simple one-to-one Langmuir binding model (ProteOn XPR36 Evaluation Software or Scrubber software (BioLogic)) by simultaneously fitting the association and dissociation sensorgrams. The equilibrium dissociation constant (K_{D}) was calculated as the ratio k_{off}/kₒₙ. This data was used to determine the comparative binding affinity of the affinity matured variants with the parental antibody. Table 6a shows the data generated from these assays.

[0486] G3, E10, C5 for the light chain, and D6, A7, B7, B8, C1 for the heavy chain were chosen for conversion into human IgG₁ format. Since CDR1 and 2 of the light chain were randomized independent from CDR3, the obtained CDRs were combined during IgG conversion.

[0487] In the IgG format affinities were measured again to the human MCSP antigen (SEQ ID NO: 376), in addition also to the cynomolgus homologue (SEQ ID NO: 375).

[0488] The method used was exactly as described for the Fab fragments, just using purified IgG from mammalian production.

TABLE 6a
MCSP affinity matured clones: Proteon data.

| | | | | Human | Cyno |
|---|---|---|---|---|---|
| | | | | MCSP | MCSP |
| | Human | Human | Cyno | IgG K_{D} | IgG K_{D} |
| | MCSP | MCSP | MCSP | Comparative binding | |
| | Fab K_{D} | IgG K_{D} | IgG K_{D} | affinity— | |
| Variant | Proteon generated affinity data | | | Fold increase over parent | |
| Parental M4-3/ML2 | 5*10⁻⁹ | 2*10⁻⁹ | 2*10⁻⁹ | | |
| M4-3/ML2(G3) | 4*10⁻¹⁰ | 3*10⁻¹⁰ | 6*10⁻¹⁰ | 6.7 | 3.3 |
| M4-3/ML2(E10) | 7*10⁻¹⁰ | 1*10⁻⁹ | 2*10⁻⁹ | 2.0 | 1.0 |
| M4-3/ML2(E10/G3) | | 4*10⁻¹⁰ | 9*10⁻¹⁰ | 5.0 | 2.2 |
| M4-3/ML2(C5) | 7*10⁻¹⁰ | 4*10⁻¹⁰ | 1*10⁻⁹ | 5.0 | 2.0 |
| M4-3/ML2(C5/G3) | | 7*10⁻¹⁰ | 1*10⁻⁹ | 2.9 | 2.0 |
| M4-3(D6)/ML2 | 2*10⁻⁹ | 4*10⁻¹⁰ | 1*10⁻⁹ | 5.0 | 2.0 |
| M4-3(A7)/ML2 | 2*10⁻¹¹ | 8*10⁻¹⁰ | 1*10⁻⁹ | 2.5 | 2.0 |
| M4-3(B7)/ML2 | | 5*10⁻¹⁰ | 7*10⁻¹⁰ | 4.0 | 2.9 |
| M4-3(B8)/ML2 | 3*10⁻¹⁰ | 9*10⁻¹⁰ | 1*10⁻⁹ | 2.2 | 2.0 |
| M4-3(C1)/ML2 | 6*10⁻¹⁰ | 9*10⁻¹⁰ | 8*10⁻¹⁰ | 2.2 | 2.5 |
| M4-3(C1)/ML2(G3) | | 7*10⁻¹¹ | 2*10⁻¹⁰ | 28.6 | 10.0 |
| M4- | | 5*10⁻¹⁰ | 6*10⁻¹⁰ | 4.0 | 3.3 |
| 3(C1)/ML2(E10) | | | | | |
| M4-3(A7)/ML2(G3) | | 7*10⁻¹¹ | 2*10⁻¹⁰ | 28.6 | 10.0 |
| M4- | | 3*10⁻¹⁰ | 7*10⁻¹⁰ | 6.7 | 2.9 |
| 3(A7)/ML2(E10) | | | | | |
| M4-3(C1)/ML2(C5) | | 2*10⁻¹⁰ | 3*10⁻¹⁰ | 10.0 | 6.7 |
| M4-(A7)/ML2(C5) | | 7*10⁻¹⁰ | 2*10⁻¹⁰ | 28.6 | 10.0 |

### Affinity Determination by Surface Plasmon Resonance (SPR) Using Biacore T200

[0489] Surface plasmon resonance (SPR) experiments to determine the affinity and the avidity of the affinity matured IgGs were performed on a Biacore T200 at 25° C. with HBS-EP as running buffer (0.01 M HEPES pH 7.4, 0.15 M NaCl, 3 mM EDTA, 0.005% Surfactant P20, Biacore, Freiburg/Germany).

[0490] For analyzing the avidity of the interaction of different anti-MCSP IgGs to human and cynomolgus MCSP D3 direct coupling of around 9,500 resonance units (RU) of the anti-Penta His antibody (Qiagen) was performed on a CM5 chip at pH 5.0 using the standard amine coupling kit (Biacore, Freiburg/Germany). Antigens were captured for 60 s at 30 nM with 10 μl/min respectively. IgGs were passed at a concentration of 0.0064-100 nM with a flowrate of 30 μl/min through the flow cells over 280 s. The dissociation was monitored for 180 s. Bulk refractive index differences were corrected for by subtracting the response obtained on reference flow cell. Here, the IgGs were flown over a surface with immobilized anti-Penta His antibody but on which HBS-EP has been injected rather than human MCSP D3 or cynomolgus MCSP D3. For affinity measurements IgGs were captured on a CM5 sensorchip surface with immobilized anti human Fc. Capture IgG was coupled to the sensorchip surface by direct immobilization of around 9,500 resonance units (RU) at pH 5.0 using the standard amine coupling kit (Biacore, Freiburg/Germany). IgGs are captured for 25 s at 10 nM with 30 μl/min. Human and cynomolgus MCSP D3 were passed at a concentration of 2-500 nM with a flowrate of 30 μl/min through the flow cells over 120 s. The dissociation was monitored for 60 s. Association and dissociation for concentration 166 and 500 nM was monitored for 1200 and 600 s, respectively. Bulk refractive index differences were corrected for by subtracting the response obtained on reference flow cell. Here, the antigens were flown over a surface with immobilized anti-human Fc antibody but on which HBS-EP has been injected rather than anti-MCSP IgGs.

[0491] Kinetic constants were derived using the Biacore T200 Evaluation Software (vAA, Biacore AB, Uppsala/Sweden), to fit rate equations for 1:1 Langmuir binding by numerical integration.

[0492] Higher affinity to human and cynomolgus MCSP D3 were confirmed by surface plasmon resonance measurements using Biacore T200. In addition, avidity measurements showed an up to 3-fold increase in bivalent binding (Table 6b).

TABLE 6b
Affinity and avidity of anti MCSP IgGs to human
MCSP-D3 and cynomolgus MCSP-D3.

| K_{D} in nM | Human MCSP D3 | | Cynomolgus MCSP D3 | |
|---|---|---|---|---|
| T = 25° C. | Affinity | Avidity | Affinity | Avidity |
| M4-3(C1) ML2(G3) | 1.8 | 0.0045 | 1.4 | 0.0038 |
| M4-3(C1) ML2(E10) | 4.6 | 0.0063 | 3.8 | 0.0044 |
| M4-3(C1) ML2(C5) | 1.8 | 0.0046 | 1.3 | 0.0044 |
| M4-3 ML2 (parental) | 8.6 | 0.0090 | 11.4 | 0.0123 |

### Example 11

### Preparation of MCSP TCB (2+1 Crossfab-IgG P329G LALA Inverted) Containing M4-3(C1) ML2(G3) as Anti MCSP Antibody and Humanized CH2527 as Anti CD3 Antibody

[0493] The variable region of heavy and light chain DNA sequences were subcloned in frame with either the constant heavy chain or the constant light chain pre-inserted into the respective recipient mammalian expression vector. The antibody expression was driven by an MPSV promoter and carries a synthetic polyA signal sequence at the 3′ end of the CDS. In addition each vector contains an EBV OriP sequence.

[0494] The molecule was produced by co-transfecting HEK293-EBNA cells with the mammalian expression vectors using polyethylenimine (PEI). The cells were transfected with the corresponding expression vectors in a 1:2:1:1 ratio (“vector heavy chain Fc(hole)”:“vector light chain”:“vector light chain Crossfab”:“vector heavy chain Fc(knob)-FabCrossfab”).

[0495] For transfection HEK293 EBNA cells were cultivated in suspension serum-free in CD CHO culture medium. For the production in 500 ml shake flask 400 million HEK293 EBNA cells were seeded 24 hours before transfection. For transfection cells were centrifuged for 5 min at 210×g, supernatant was replaced by pre-warmed 20 ml CD CHO medium. Expression vectors were mixed in 20 ml CD CHO medium to a final amount of 200 μg DNA. After addition of 540 μl PEI solution the mixture was vortexed for 15 s and subsequently incubated for 10 min at room temperature. Afterwards cells were mixed with the DNA/PEI solution, transferred to a 500 ml shake flask and incubated for 3 hours at 37° C. in an incubator with a 5% CO₂ atmosphere. After incubation time 160 ml F17 medium was added and cell were cultivated for 24 hours. One day after transfection 1 mM valproic acid and 7% Feed 1 (Lonza) was added. After 7 days cultivation supernatant was collected for purification by centrifugation for 15 min at 210×g, the solution was sterile filtered (0.22 μm filter) and sodium azide in a final concentration of 0.01% w/v was added, and kept at 4° C.

[0496] The secreted protein was purified from cell culture supernatants by affinity chromatography using Protein A. Supernatant was loaded on a HiTrap Protein A HP column (CV=5 mL, GE Healthcare) equilibrated with 40 ml 20 mM sodium phosphate, 20 mM sodium citrate, 0.5 M sodium chloride, pH 7.5. Unbound protein was removed by washing with at least 10 column volumes 20 mM sodium phosphate, 20 mM sodium citrate, 0.5 M sodium chloride, pH 7.5. Target protein was eluted during a gradient over 20 column volumes from 20 mM sodium citrate, 0.5 M sodium chloride, pH 7.5 to 20 mM sodium citrate, 0.5 M sodium chloride, pH 2.5. Protein solution was neutralized by adding 1/10 of 0.5 M sodium phosphate, pH 8. Target protein was concentrated and filtrated prior loading on a HiLoad Superdex 200 column (GE Healthcare) equilibrated with 20 mM histidine, 140 mM sodium chloride solution of pH 6.0.

[0497] The protein concentration of purified protein samples was determined by measuring the optical density (OD) at 280 nm, using the molar extinction coefficient calculated on the basis of the amino acid sequence.

[0498] Purity and molecular weight of molecules were analyzed by CE-SDS analyses in the presence and absence of a reducing agent. The Caliper LabChip GXII system (Caliper lifescience) was used according to the manufacturer's instruction. 2 μg sample was used for analyses.

[0499] The aggregate content of antibody samples was analyzed using a TSKgel G3000 SW XL analytical size-exclusion column (Tosoh) in 25 mM K₂HPO₄, 125 mM NaCl, 200 mM L-arginine monohydrochloride, 0.02% (w/v) NaN₃, pH 6.7 running buffer at 25° C.

TABLE 7a
Summary production and purification of MCSP TCB.

| | | | Aggregate | | | |
|---|---|---|---|---|---|---|
| | | | after 1^{st} | | | |
| | Titer | Yield | purification | HMW | LMW | Monomer |
| Construct | [mg/l] | [mg/l] | step [%] | [%] | [%] | [%] |
| MCSP | 157 | 0.32 | 32 | 3.3 | 0 | 96.7 |
| TCB | | | | | | |

[0500] FIG. 69 shows a schematic drawing of the MCSP TCB (2+1 Crossfab-IgG P329G LALA inverted) molecule.

[0501] FIG. 70 and Table 7b show CE-SDS analyses of a MCSP TCB (2+1 Crossfab-IgG P329G LALA inverted) molecule (SEQ ID NOs: 278, 319, 320 and 321).

TABLE 7b
CE-SDS analyses of MCSP TCB.

| | Peak | kDa | Corresponding Chain |
|---|---|---|---|
| MCSP TCB non reduced (A) | 1 | 206.47 | |
| MCSP TCB reduced (B) | 1 | 29.15 | Light chain ML2 (C1) |
| | 2 | 37.39 | Light chain huCH2527 |
| | 3 | 66.07 | Fc(hole) |
| | 4 | 94.52 | Fc(knob) |

### Example 12

### Preparation of CEA TCB (2+1 Crossfab-IgG P329G LALA Inverted) Containing CH1A1a 98/99 2F1 as Anti CEA Antibody and Humanized CH2527 as Anti CD3 Antibody

[0502] The variable region of heavy and light chain DNA sequences were subcloned in frame with either the constant heavy chain or the constant light chain pre-inserted into the respective recipient mammalian expression vector. The antibody expression was driven by an MPSV promoter and carries a synthetic polyA signal sequence at the 3′ end of the CDS. In addition each vector contains an EBV OriP sequence.

[0503] The molecule was produced by co-transfecting HEK293 EBNA cells with the mammalian expression vectors using polyethylenimine (PEI). The cells were transfected with the corresponding expression vectors in a 1:2:1:1 ratio (“vector heavy chain Fc(hole)”:“vector light chain”:“vector light chain Crossfab”:“vector heavy chain Fc(knob)-FabCrossfab”).

[0504] For transfection HEK293 EBNA cells were cultivated in suspension serum-free in CD CHO culture medium. For the production in 500 ml shake flask 400 million HEK293 EBNA cells were seeded 24 hours before transfection. For transfection cells were centrifuged for 5 min at 210×g, supernatant was replaced by pre-warmed 20 ml CD CHO medium. Expression vectors were mixed in 20 ml CD CHO medium to a final amount of 200 μg DNA. After addition of 540 μl PEI solution the mixture was vortexed for 15 s and subsequently incubated for 10 min at room temperature. Afterwards cells were mixed with the DNA/PEI solution, transferred to a 500 ml shake flask and incubated for 3 hours by 37° C. in an incubator with a 5% CO₂ atmosphere. After incubation time 160 ml F17 medium was added and cell were cultivated for 24 hours. One day after transfection 1 mM valproic acid and 7% Feed 1 (Lonza) was added. After 7 days cultivation supernatant was collected for purification by centrifugation for 15 min at 210×g, the solution was sterile filtered (0.22 μm filter) and sodium azide in a final concentration of 0.01% w/v was added, and kept at 4° C.

[0505] The secreted protein was purified from cell culture supernatants by affinity chromatography using Protein A. Supernatant was loaded on a HiTrap Protein A HP column (CV=5 mL, GE Healthcare) equilibrated with 40 ml 20 mM sodium phosphate, 20 mM sodium citrate, 0.5 M sodium chloride, pH 7.5. Unbound protein was removed by washing with at least 10 column volumes 20 mM sodium phosphate, 20 mM sodium citrate, 0.5 M sodium chloride, pH 7.5. Target protein was eluted during a gradient over 20 column volumes from 20 mM sodium citrate, 0.5 M sodium chloride, pH 7.5 to 20 mM sodium citrate, 0.5 M sodium chloride, pH 2.5. Protein solution was neutralized by adding 1/10 of 0.5 M sodium phosphate, pH 8. Target protein was concentrated and filtrated prior loading on a HiLoad Superdex 200 column (GE Healthcare) equilibrated with 20 mM histidine, 140 mM sodium chloride solution of pH 6.0.

[0506] The protein concentration of purified protein samples was determined by measuring the optical density (OD) at 280 nm, using the molar extinction coefficient calculated on the basis of the amino acid sequence.

[0507] Purity and molecular weight of molecules were analyzed by CE-SDS analyses in the presence and absence of a reducing agent. The Caliper LabChip GXII system (Caliper lifescience) was used according to the manufacturer's instructions. 2 μg sample was used for analyses.

[0508] The aggregate content of antibody samples was analyzed using a TSKgel G3000 SW XL analytical size-exclusion column (Tosoh) in 25 mM K₂HPO₄, 125 mM NaCl, 200 mM L-arginine monohydrochloride, 0.02% (w/v) NaN₃, pH 6.7 running buffer at 25° C.

TABLE 8
Summary production and purification of CEA TCB.

| | | | Aggregate | | | |
|---|---|---|---|---|---|---|
| | | | after 1^{st} | | | |
| | Titer | Yield | purification | HMW | LMW | Monomer |
| Construct | [mg/l] | [mg/l] | step [%] | [%] | [%] | [%] |
| CEA TCB | 66 | 0.31 | 21.5 | 8.1 | 4.4 | 87.5 |

[0509] FIG. 71 shows a schematic drawing of CEA TCB (2+1 Crossfab-IgG P329G LALA inverted) molecule.

[0510] FIG. 72 and Table 9 show CE-SDS analyses of a CEA TCB (2+1 Crossfab-IgG P329G LALA inverted) molecule (SEQ ID NOs: 288, 322, 323 and 324).

TABLE 9
CE-SDS analyses of CEA TCB.

| | Peak | kDa | Corresponding Chain |
|---|---|---|---|
| CEA TCB non reduced (A) | 1 | 205.67 | Correct molecule |
| CEA TCB reduced (B) | 1 | 28.23 | Light chain CH1A1A |
| | | | 98/99 x 2F1 |
| | 2 | 36.31 | Light chain CH2527 |
| | 3 | 63.48 | Fc(hole) |
| | 4 | 90.9 | Fc(knob) |

[0511] In an alternative purification method, the CEA TCB was captured from harvested and clarified fermentation supernatant by Protein A affinity chromatography (MabSelect SuRe). The Protein A eluate was then submitted to cation exchange chromatography (Poros 50 HS) and subsequently fractionated and analyzed by means of SE-HPLC and capillary electrophoresis. The product containing fractions were pooled and subjected to hydrophobic interaction chromatography (Butyl-Sepharose 4FF) at room temperature in a bind-elute mode. The eluate therefrom was then fractionated and analyzed by means of SE-HPLC and capillary electrophoresis. The product containing fractions were pooled and subsequently anion exchange chromatography (Q-Sepharose FF) in flow-through mode was performed. The material obtained using this purification method had a monomer content of >98%.

### Example 13

### Binding of MCSP TCB to MCSP- and CD3-Expressing Cells

[0512] The binding of MCSP TCB was tested on a MCSP-expressing human malignant melanoma cell line (A375) and a CD3-expressing immortalized T lymphocyte line (Jurkat). Briefly, cells were harvested, counted, checked for viability and resuspended at 2×10⁶ cells/ml in FACS buffer (100 μl PBS 0.1% BSA). 100 μl cell suspension (containing 0.2×10⁶ cells) were incubated in round-bottom 96-well plate for 30 min at 4° C. with increasing concentrations of the MCSP TCB (2.6 pM-200 nM), washed twice with cold PBS 0.1% BSA, re-incubated for further 30 min at 4° C. with the PE-conjugated AffiniPure F(ab′)2 Fragment goat anti-human IgG Fcγ Fragment Specific secondary antibody (Jackson Immuno Research Lab PE #109-116-170), washed twice with cold PBS 0.1% BSA and immediately analyzed by FACS using a FACS CantoII (Software FACS Diva) by gating live, DAPI-negative, cells. Binding curves were obtained using GraphPadPrism5 (FIG. 73A, binding to A375 cells, EC₅₀=3381 pM; FIG. 73B, binding to Jurkat cells).

### Example 14

### T-Cell Killing Induced by MCSP TCB Antibody

[0513] T-cell killing mediated by MCSP TCB antibody was assessed using a panel of tumor cell lines expressing different levels of MCSP (A375=MCSP high, MV-3=MSCP medium, HCT-116=MCSP low, LS180=MCSP negative). Briefly, target cells were harvested with Trypsin/EDTA, washed, and plated at density of 25 000 cells/well using flat-bottom 96-well plates. Cells were left to adhere overnight. Peripheral blood mononuclear cells (PBMCs) were prepared by Histopaque density centrifugation of enriched lymphocyte preparations (buffy coats) obtained from healthy human donors. Fresh blood was diluted with sterile PBS and layered over Histopaque gradient (Sigma, #H8889). After centrifugation (450×g, 30 minutes, room temperature), the plasma above the PBMC-containing interphase was discarded and PBMCs transferred in a new falcon tube subsequently filled with 50 ml of PBS. The mixture was centrifuged (400×g, 10 minutes, room temperature), the supernatant discarded and the PBMC pellet washed twice with sterile PBS (centrifugation steps 350×g, 10 minutes). The resulting PBMC population was counted automatically (ViCell) and stored in RPMI1640 medium containing 10% FCS and 1% L-alanyl-L-glutamine (Biochrom, K0302) at 37° C., 5% CO₂ in cell incubator until further use (no longer than 24 h). For the killing assay, the antibody was added at the indicated concentrations (range of 1 pM-10 nM in triplicates). PBMCs were added to target cells at final effector to target (E:T) ratio of 10:1. Target cell killing was assessed after 24 h of incubation at 37° C., 5% CO₂ by quantification of LDH released into cell supernatants by apoptotic/necrotic cells (LDH detection kit, Roche Applied Science, #11 644 793 001). Maximal lysis of the target cells (=100%) was achieved by incubation of target cells with 1% Triton X-100. Minimal lysis (=0%) refers to target cells co-incubated with effector cells without bispecific construct. The results show that MCSP TCB induced a strong and target-specific killing of MCSP-positive target cell lines with no killing of MCSP-negative cell lines (FIG. 74, A-D). The EC₅₀ values related to the killing assays, calculated using GraphPadPrism5 are given in Table 10.

TABLE 10
EC₅₀ values (pM) for T-cell mediated killing of MCSP-
expressing tumor cells induced by MCSP TCB antibody.

| Cell line | MCSP receptor copy number | EC₅₀ [pM] |
|---|---|---|
| A375 | 387 058 | 12.3 |
| MV-3 | 260 000 | 9.4 |
| HCT-116 | 36770 | 3.7 |
| LS180 | Negative | n.d. |

### Example 15

### CD25 and CD69 Upregulation on CD8⁺ and CD4⁺ Effector Cells after T Cell Killing of MCSP-Expressing Tumor Cells Induced by MCSP TCB Antibody

[0514] Activation of CD8⁺ and CD4⁺ T cells after T-cell killing of MCSP-expressing MV-3 tumor cells mediated by the MCSP TCB antibody was assessed by FACS analysis using antibodies recognizing the T cell activation markers CD25 (late activation marker) and CD69 (early activation marker). The antibody and the killing assay conditions were essentially as described above (Example 14), using the same antibody concentration range (1 pM-10 nM in triplicates), E:T ratio 10:1 and an incubation time 24 h.

[0515] After the incubation, PBMCs were transferred to a round-bottom 96-well plate, centrifuged at 350×g for 5 min and washed twice with PBS containing 0.1% BSA. Surface staining for CD8 (FITC anti-human CD8, BD #555634), CD4 (PECy7 anti-human CD4, BD #557852), CD69 (PE anti-human CD69, Biolegend #310906) and CD25 (APC anti-human CD25, BD #555434) was performed according to the suppliers' indications. Cells were washed twice with 150 μl/well PBS containing 0.1% BSA and fixed for 15 min at 4° C. using 100 μl/well fixation buffer (BD #554655). After centrifugation, the samples were resuspended in 200 μl/well PBS 0.1% BSA containing DAPI to exclude dead cells for the FACS measurement. Samples were analyzed at BD FACS Fortessa. The results show that MCSP TCB induced a strong and target-specific upregulation of activation markers (CD25, CD69) on CD8⁺ T cells (FIG. 75 A, B) and CD4⁺ T cells (FIG. 75 C, D) after killing.

### Example 16

### Cytokine Secretion by Human Effector Cells after T Cell-Killing of MCSP-Expressing Tumor Cells Induced by MCSP TCB Antibody

[0516] Cytokine secretion by human PBMCs after T-cell killing of MCSP-expressing MV-3 tumor cells induced by the MCSP TCB antibody was assessed by FACS analysis of cell supernatants after the killing assay.

[0517] The same antibody was used and the killing assay was performed essentially as described above (Example 14 and 15), using an E:T ratio of 10:1 and an incubation time of 24 h.

[0518] At the end of the incubation time, the plate was centrifuged for 5 min at 350×g, the supernatant transferred in a new 96-well plate and stored at −20° C. until subsequent analysis. Granzyme B, TNFα, IFN-γ, IL-2, IL-4 and IL-10 secreted into in cell supernatants were detected using the BD CBA Human Soluble Protein Flex Set, according to manufacturer's instructions on a FACS CantoII. The following kits were used: BD CBA human Granzyme B BD CBA human Granzyme B Flex Set #BD 560304; BD CBA human TNF Flex Set #BD 558273; BD CBA human IFN-γ Flex Set #BD 558269; BD CBA human IL-2 Flex Set #BD 558270; BD CBA human IL-4 Flex Set #BD 558272; BD CBA human IL-10 Flex Set #BD 558274.

[0519] The results show that MCSP TCB induced secretion of IL-2, IFN-γ, TNFα, Granzyme B and IL-10 (but no IL-4) upon killing (FIG. 76, A-F).

[0520] Taken together, these examples show that the MCSP CD3 bispecific antibody
[0521] Showed a good binding to MCSP-positive A375 cells
[0522] Induced a strong and target-specific killing of MCSP-positive target cell lines, and no killing of MCSP-negative cell lines
[0523] Induced a strong and target-specific upregulation of activation markers (CD25, CD69) on CD8⁺ and CD4⁺ T cells after killing
[0524] Induced secretion of IL-2, IFN-γ, TNFα, Granzyme B and IL-10 (no IL-4) upon killing.

### Example 17

### Binding of CEA TCB to CEA- and CD3-Expressing Cells

[0525] The binding of CEA TCB was tested on transfected CEA-expressing lung adenocarcinoma cells (A549-huCEA) and CD3-expressing immortalized human and cynomolgus T lymphocyte lines (Jurkat and HSC-F, respectively). An untargeted TCB (SEQ ID NOs:325, 326, 327 and 328; see example 33) was used as control. Briefly, cells were harvested, counted, checked for viability and resuspended at 2×10⁶ cells/ml in FACS buffer (100 μl PBS 0.1% BSA). 100 μl cell suspension (containing 0.2×10⁶ cells) were incubated in round-bottom 96-well plate for 30 min at 4° C. with increasing concentrations of the CEA TCB (61 pM-1000 nM), washed twice with cold PBS 0.1% BSA, re-incubated for further 30 min at 4° C. with the FITC-conjugated AffiniPure F(ab′)2 Fragment goat anti-human IgG F(ab′)2 Fragment Specific secondary antibody (Jackson Immuno Research Lab FITC #109-096-097), washed twice with cold PBS 0.1% BSA and immediately analyzed by FACS using a FACS CantoII or Fortessa (Software FACS Diva) by gating live, PI-negative, cells. Binding curves were obtained using GraphPadPrism5 (FIG. 77A, binding to A549 cells (EC₅₀ 6.6 nM); FIG. 77B, binding to Jurkat cells; FIG. 77C, binding to HSC-F cells).

### Example 18

### T Cell-Mediated Killing of CEA-Expressing Tumor Target Cells Induced by CEA TCB Antibody

[0526] T cell-mediated killing of target cells induced by CEA TCB antibody was assessed on HPAFII (high CEA), BxPC-3 (medium CEA) and ASPC-1 (low CEA) human tumor cells. HCT-116 (CEA negative tumor cell line) and the untargeted TCB were used as negative controls. Human PBMCs were used as effectors and killing detected 24 h and 48 h after incubation with the bispecific antibody. Briefly, target cells were harvested with Trypsin/EDTA, washed, and plated at density of 25 000 cells/well using flat-bottom 96-well plates. Cells were left to adhere overnight. Peripheral blood mononuclear cells (PBMCs) were prepared by Histopaque density centrifugation of enriched lymphocyte preparations (buffy coats) obtained from healthy human donors. Fresh blood was diluted with sterile PBS and layered over Histopaque gradient (Sigma, #H8889). After centrifugation (450×g, 30 minutes, room temperature), the plasma above the PBMC-containing interphase was discarded and PBMCs transferred in a new falcon tube subsequently filled with 50 ml of PBS. The mixture was centrifuged (400×g, 10 minutes, room temperature), the supernatant discarded and the PBMC pellet washed twice with sterile PBS (centrifugation steps 350×g, 10 minutes). The resulting PBMC population was counted automatically (ViCell) and kept in RPMI1640 medium containing 10% FCS and 1% L-alanyl-L-glutamine (Biochrom, K0302) in cell incubator (37° C., 5% CO₂) until further use (no longer than 24 h). For the killing assay, the antibodies were added at indicated concentrations (range of 6 pM-100 nM in triplicates). PBMCs were added to target cells at the final E:T ratio of 10:1. Target cell killing was assessed after 24 h and 48 h of incubation by quantification of LDH (lactate dehydrogenase) released into cell supernatants by apoptotic/necrotic cells (LDH detection kit, Roche Applied Science, #11 644 793 001). Maximal lysis of the target cells (=100%) was achieved by incubation of target cells with 1% Triton X-100. Minimal lysis (=0%) refers to target cells co-incubated with effector cells without bispecific antibody. The results show that CEA TCB induced a strong and target-specific killing of CEA-positive target cells (FIG. 78, A-H). The EC₅₀ values related to the killing assays, calculated using GraphPadPrism5 are given in Table 11.

TABLE 11
CEA receptor copy number and EC₅₀ values
(pM) for T-cell mediated killing of CEA-expressing
tumor cells induced by CEA TCB antibody.

| | CEA receptor | EC50 [pM] |
|---|---|---|
| Cell line | copy number | 48 h |
| HPAFII | 120 000-205 000 | 667 |
| BxPC-3 | 41 000 | 3785 |
| ASPC1 | 3500-8000 | 846 |

### Example 19

### T Cell Proliferation and Activation 5 Days after CEA TCB-Mediated Killing of CEA-Expressing Tumor Target Cells

[0527] T cell proliferation and activation was detected 5 days after CEA TCB-mediated killing of CEA-expressing tumor target cells assessed on HPAFII (high CEA), BxPC-3 (medium CEA) and ASPC-1 (low CEA) cells. HCT-116 (CEA negative tumor cell line) and the untargeted TCB were used as negative controls. The experimental conditions for the proliferation assay were similar to the ones described in Example 18, but only 10 000 target cells were plated per well of a 96-flat bottom well plate. To assess T cell proliferation, freshly-isolated PBMCs were labeled using CFSE (Sigma #21888). Briefly, CFSE stock solution was diluted to obtain a working solution of 100 μM. 90×10⁶ PBMC cells were re-suspended in 90 ml pre-warmed PBS and supplemented with 90 μl of the CFSE working solution. Cells were mixed immediately and incubated 15 min at 37° C. 10 ml of pre-warmed FCS were added to cells to stop the reaction. The cells were centrifuged for 10 min at 400 g, re-suspended in 50 ml medium and incubated for 30 min at 37° C. After incubation, cells were washed once with warm medium, counted, re-suspended in medium and added to target cells for the killing assay and subsequent measurement of cell proliferation and activation at an E:T of 10:1. Proliferation was assessed 5 days after killing on CD4 and CD8 positive T cells by quantification of the CFSE dye dilution. CD25 expression was assessed on the same T cell subsets using the anti-human CD25 antibody. Briefly, after centrifugation (400×g for 4 min), cells were resuspended, washed with FACS buffer and incubated with 25 μl of the diluted CD4/CD8/CD25 antibody mix for 30 min at 4° C. (APC/Cy7 anti-human CD4 #317418, APC anti-human CD8 #301014, PE/Cy7 anti-human CD25 #302612). Cells were then washed three times to remove the unbound antibody, and finally resuspended in 200 μl FACS buffer containing propidium iodide (PI) to exclude dead cells for the FACS measurement. Fluorescence was measured using BD FACS CantoII. The results show that the CEA TCB induced a strong and target-specific proliferation of CD8⁺ and CD4⁺ T cells (FIG. 79, A-D) as well as their activation as detected by up-regulation of the CD25 activation marker (FIG. 79, E-H).

### Example 20

### Cytokine Secretion by Human Effector Cells after T Cell-Mediated Killing of CEA-Expressing Tumor Cells Induced by CEA TCB

[0528] Cytokine secretion by human PBMCs after T cell-mediated killing of CEA-expressing MKN45 tumor cells induced by the CEA TCB was assessed by FACS analysis (CBA kit) of cell supernatants 48 h after killing.

[0529] The experimental conditions were identical to the ones described in Example 18. At the end of the incubation time, the plate was centrifuged for 5 min at 350×g, the supernatant transferred into a new 96-well plate and stored at −20° C. until subsequent analysis. (A) IFN-γ, (B) TNFα, (C) Granzyme B, (D) IL-2, (E) IL-6 and (F) IL-10 secreted into cell supernatants were detected using the BD CBA Human Soluble Protein Flex Set, according to the manufacturer's instructions on a FACS CantoII. The following kits were used: BD CBA human IL-2 BD Flex Set #BD 558270; BD CBA human Granzyme B BD Flex Set #BD 560304; BD CBA human TNF Flex Set #BD 558273; BD CBA human IFN-γ Flex Set #BD 558269; BD CBA human IL-4 Flex Set #BD 558272; BD CBA human IL-10 Flex Set #BD 558274.

[0530] The results show that the CEA TCB mediated killing (but not the killing mediated by untargeted TCB control) induced secretion of IFN-γ, TNFα, Granzyme B, IL-2, IL-6 and IL-10 (FIG. 80, A-F).

### Example 21

### T Cell-Mediated Killing of Target Cells in Presence of Increasing Concentrations of Shed CEA (sCEA)

[0531] T cell-mediated killing of CEA-expressing tumor target cells (LS 180) induced by CEA TCB antibody in presence of increasing concentrations of shed CEA (sCEA 2.5 ng/ml-5 μg/ml) was assessed. Human PBMCs were used as effector cells and killing detected 24 h and 48 h after incubation with the bispecific antibody and sCEA. Briefly, target cells were harvested with Trypsin/EDTA, washed, and plated at density of 25 000 cells/well using flat-bottom 96-well plates. Cells were left to adhere overnight. Peripheral blood mononuclear cells (PBMCs) were prepared by Histopaque density centrifugation of enriched lymphocyte preparations (buffy coats) obtained from healthy human donors. Fresh blood was diluted with sterile PBS and layered over Histopaque gradient (Sigma, #H8889). After centrifugation (450×g, 30 minutes, room temperature), the plasma above the PBMC-containing interphase was discarded and PBMCs transferred in a new Falcon tube subsequently filled with 50 ml of PBS. The mixture was centrifuged (400×g, 10 minutes, room temperature), the supernatant discarded and the PBMC pellet washed twice with sterile PBS (centrifugation steps 350×g, 10 minutes). The resulting PBMC population was counted automatically (ViCell) and kept in RPMI1640 medium containing 10% FCS and 1% L-alanyl-L-glutamine (Biochrom, K0302) in cell incubator (37° C., 5% CO₂) until further use (no longer than 24 h). For the killing assay, the CEA TCB antibody was used at a fixed concentration of 1 nM and sCEA was spiked into the experiment at a concentration range of 2.5 ng-5 μg/ml. PBMCs were added to target cells at the final E:T ratio of 10:1. Target cell killing was assessed after 24 h and 48 h of incubation by quantification of LDH (lactate dehydrogenase) released into cell supernatants by apoptotic/necrotic cells (LDH detection kit, Roche Applied Science, #11 644 793 001). Maximal lysis of the target cells (=100%) was achieved by incubation of target cells with 1% Triton X-100. Minimal lysis (=0%) refers to target cells co-incubated with effector cells without bispecific antibody. The killing mediated by CEA TCB in absence of sCEA was set at 100% and the killing obtained in presence of increasing concentrations of sCEA was normalized to it. Results show that sCEA had only a minor impact on CEA TCB-mediated killing of CEA-expressing target cells (FIG. 81 A, B). No effect on T cell killing was detected up to 0.2 μg/ml of sCEA. The sCEA concentrations above 0.2 μg/ml had only a minor impact on overall killing (10-50% reduction).

### Example 22

### T Cell-Mediated Killing of Target Cells Using Human and Cynomolgus PBMCs as Effector Cells

[0532] T cell-mediated killing of A549 (lung adenocarcinoma) cells overexpressing human CEA (A549-hCEA), assessed 21 h and 40 h after incubation with CEA TCB antibody and human PBMCs or cynomolgus PBMCs as effector cells was assessed. Briefly, target cells were harvested with Trypsin/EDTA, washed, and plated at density of 25 000 cells/well using flat-bottom 96-well plates. Cells were left to adhere for several hours. Peripheral blood mononuclear cells (PBMCs) were prepared by Histopaque density centrifugation of enriched lymphocyte preparations (buffy coats) obtained from healthy human donors or healthy cynomolgus monkey. For the later, a 90% Histopaque-PBS density gradient was used. Fresh blood was diluted with sterile PBS and layered over Histopaque gradient (Sigma, #H8889). After centrifugation (450×g, 30 minutes, room temperature for human PBMCs, respective 520×g, 30 min, room temperature for cynomolgus PBMCs), the plasma above the PBMC-containing interphase was discarded and PBMCs transferred in a new Falcon tube subsequently filled with 50 ml of PBS. The mixture was centrifuged (400×g, 10 minutes, room temperature), the supernatant discarded and the PBMC pellet washed twice with sterile PBS (centrifugation steps 350×g, 10 minutes). For the preparation of the cynomolgus PBMCs, an additional low-speed centrifugation step was performed at 150×g for 15 min. The resulting PBMC population was counted automatically (ViCell) and kept in RPMI1640 medium containing 10% FCS and 1% L-alanyl-L-glutamine (Biochrom, K0302) in cell incubator (37° C., 5% CO₂) until further use (up to 4 h). For the killing assay, the antibodies were added at indicated concentrations (range of 6 pM-100 nM in triplicates). PBMCs were added to target cells at the final E:T ratio of 10:1. Target cell killing was assessed after 21 h and 40 h of incubation by quantification of LDH (lactate dehydrogenase) released into cell supernatants by apoptotic/necrotic cells (LDH detection kit, Roche Applied Science, #11 644 793 001). Maximal lysis of the target cells (=100%) was achieved by incubation of target cells with 1% Triton X-100. Minimal lysis (=0%) refers to target cells co-incubated with effector cells without bispecific antibody. Results show that CEA TCB mediates target-specific killing of CEA-positive target cells using both human (FIG. 82, A, C) and cynomolgus (FIG. 82, B, D) effector cells (PBMCs). The EC₅₀ values related to 40 h of killing, calculated using GraphPadPrism5 are 306 pM for human PBMCs and 102 pM for cynomolgus PBMCs.

### Example 23

### T Cell-Mediated Killing of CEA-Expressing Human Colorectal Cancer Cell Lines Induced by CEA TCB Antibody

[0533] T cell-mediated killing of CEA-expressing human colorectal cancer cell lines 48 h after incubation with human PBMCs and CEA TCB antibody at 0.8 nM, 4 nM and 20 nM was assessed. Briefly, PBMCs were isolated from leukocyte cones obtained from single healthy donors. Cells were diluted with PBS (1:10) and layered on Lymphoprep in 50 mL Falcon tubes. After centrifugation (1800 rpm for 25 min), the PBMC layer was withdrawn from the interface and washed 4x with PBS. PBMCs were counted, frozen in 10% DMSO in FCS under controlled-rate freezing conditions at 40×10⁶ cells/mL and stored in liquid nitrogen until further use. For the T-cell killing assay, tumor cells were plated directly into 96-well plates from frozen stocks. Cells were warmed quickly and transferred immediately into pre-warmed medium, centrifuged, and re-suspended in complete medium (DMEM, Iscoves or RPMI-1640, all supplemented with 10% FCS and 1% penicillin/streptomycin) and plated at a density of 2.5×10⁴ cells/well. Plates were then incubated at 37° C. in a humidified 10% CO₂ incubator and medium replaced the next day by 100 μL of RPMI 2% FCS with 1% glutamine and 50 μL CEA TCB (final concentrations ranging from 6.4 to 20000 pM, 1:5 titration steps, in duplicate wells for each condition). Fresh-thawed PBMCs were used for the assay (thawed from frozen vials within 2 hours of the assay start) and 50 μL (3×10⁵) was added to each well to give an effector:target (E:T) ratio of 10:1. Triton X100 (50 μL of 4%) was added to 150 μL of target cells to obtain maximum release values. Plates were incubated at 37° C. for 48 h and the killing activity determined using the Lactose Dehydrogenase Cytotoxicity Detection Kit (Roche) in accordance with the manufacturer's instructions. Percentage of specific cell lysis was calculated as [sample release−spontaneous release]/[maximum release−spontaneous release]×100. FIG. 83, A-C shows the correlation between CEA expression (receptor copy number quantified using QIFIKIT, see below) and % killing for 31 colorectal cancer cell lines (listed on x axis). FIG. 83, D shows the correlation between CEA expression and % specific lysis at 20 nM of CEA TCB (Spearman correlation=0.7289, p<0.0001, n=31), indicating that tumor cells displaying high CEA receptor copy numbers (>50 000) are efficiently lysed by CEA TCB whereas a cluster of cells displaying low CEA receptor copy numbers (<10 000) are not being lysed by CEA TCB under the same experimental conditions. FIG. 83, E shows the correlation between CEA expression and EC₅₀ of CEA TCB. Although the correlation is not statistically significant (Spearman correlation=−0.3994, p=0.1006, R²=0.1358) the graph clearly shows a pattern of better CEA TCB potency (i.e. lower EC₅₀ values) on tumor cell lines expressing high CEA receptor copy numbers.

[0534] For the analysis of CEA surface expression on cancer cell lines, the Qifikit (DakoCytomation, Glostrup, Denmark) was used to calibrate the fluorescent signals and determine the number of binding sites per cell. Cells were incubated on ice for 30 min with a mouse anti-human CEACAM5 monoclonal antibody (0.5 μg for 5×105 cells, clone: CI-P83-1, sc-23928, Santa Cruz), washed twice with PBS1X-BSA 0.1% followed by a 45 min incubation with polyclonal fluorescein isothiocyanate-conjugated goat anti-mouse antibody provided with the Qifikit. Dead cells were excluded from the analysis using 4′,6-diamidino-2-phenylindole (DAPI) staining Samples were analysed on a CyAn™ ADP Analyzer (Beckman Coulter). All mean fluorescence intensities (MFIs) were obtained after data analyses using Summit 4.3 software. These MFIs were used to determine the relative number of antibody binding sites on the cell lines (named as CEA copy number on the results) using the equation obtained from the calibration curve (Qifikit calibration beads).

[0535] The colorectal cancer cell lines used for the T-cell killing assays and CEA surface expression quantification were seeded from cryovials. The method used to maintain the frozen stock was as described in Bracht et al. (Bracht et al. (2010), Br J Cancer 103, 340-346).

### Example 24

### In Vivo Anti-Tumor Efficacy of CEA TCB in a LS174T-Fluc2 Human Colon Carcinoma Co-Grafted with Human PBMC (E:T Ratio 5:1)

[0536] NOG (NOD/Shi-scid/IL-2Rγnull) mice (n=12) were injected subcutaneously with 1×10⁶ LS174T-fluc2 cells pre-mixed with human PBMC in a total volume of 100 μl in PBS, E:T ratio 5:1. LS174T-fluc2 cells have been engineered to express luciferase, which allows monitoring tumor progression by bioluminescence (BLI) in a non-invasive and highly sensitive manner. To assess early and delayed treatment effects, mice received bi-weekly i.v. injections of either 0.5 or 2.5 mg/kg of the CEA TCB starting at day 1 (early treatment) or day 7 (delayed treatment) after tumor cell/PBMCs co-grafting s.c. As a control, one group of mice received bi-weekly i.v. injections of 2.5 mg/kg of a control TCB that had the same format as CEA TCB (in this case the MCSP TCB served as untargeted control since LS174T-fluc2 cells do not express MCSP), and an extra control group received only PBS (vehicle) starting at day 1. Tumor volume was measured once a week by digital caliper. Furthermore, mice were injected i.p. once weekly with D-Luciferin and the bioluminescent light emission of living tumor cells was measured with IVIS Spectrum (Perkin Elmer). Treatment was administered until 19 days after tumor cell inoculation, which corresponds to the day of study termination. The results of the experiment are shown in FIG. 84 A-D. Results show average and SEM from 12 mice of tumor volume measured by caliper (A and C) and by bioluminescence (Total Flux, B and D) in the different study groups ((A, B) early treatment, (C, D) delayed treatment).

### Example 25

### In Vivo Anti-Tumor Efficacy of CEA TCB in a LS174T-Fluc2 Human Colon Carcinoma Co-Grafted with Human PBMC (E:T Ratio 1:1)

[0537] NOG (NOD/Shi-scid/IL-2Rγnull) mice (n=10) were injected subcutaneously with 1×10⁶ LS174T-fluc2 cells (see Example 24) pre-mixed with human PBMC in a total volume of 100 μl in PBS, E:T ratio 1:1. To assess early and delayed treatment effects, mice received bi-weekly i.v. injections of 2.5 mg/kg of the CEA TCB starting at day 1 (early treatment) or day 7 (delayed treatment) after tumor cell inoculation. As control, one group of mice received bi-weekly i.v. injections of 2.5 mg/kg of the MCSP TCB (see also Example 24), and an extra control group received only PBS (vehicle) starting at day 1. Tumor volume was measured once weekly by digital caliper. Furthermore, mice were injected i.p. once weekly with D-Luciferin and the bioluminescent light emission of living tumor cells was measured with IVIS Spectrum (Perkin Elmer). Treatment was administered until 23 days after tumor cell inoculation, which corresponds to the day of study termination. The results of the experiment are shown in FIG. 85. Results show average and SEM of tumor volume measured by caliper (A) as well as by bioluminescence (B) in the different study groups (n=10).

### Example 26

### In Vivo Efficacy of Murinized CEA TCB in a Panco2-huCEA Orthotopic Tumor Model in Immunocompetent huCD3ε/huCEA Transgenic Mice

[0538] huCD3ε/huCEA transgenic mice (n=10) received an intra-pancreatic injection of 2×10⁵ Panco2-huCEA cells in a total volume of 10 μl in PBS. As murine cells do not express CEA, the murine pancreatic carcinoma cell line Panco2 was engineered to overexpress human CEA as the target antigen for the CEA TCB. Mice were injected twice weekly i.v. with 0.5 mg/kg of the murinized CEA TCB or PBS as a control group (vehicle) and survival was monitored. Animals were controlled daily for clinical symptoms and detection of adverse effects. Termination criteria for animals were visible sickness: scruffy fur, arched back, breathing problems, impaired locomotion. The result as overall survival is shown in FIG. 86. Result shows percent of surviving animals per time point. The significance of the treatment group to the PBS control group was compared using a paired Student t test (p=0.078).

### Example 27

### Affinity of the CEA TCB to CEA and CD3 by Surface Plasmon Resonance (SPR)

[0539] Surface plasmon resonance (SPR) experiments were performed on a Biacore T100 at 25° C. with HBS-EP as running buffer (0.01 M HEPES pH 7.4, 0.15 M NaCl, 3 mM EDTA, 0.005% Surfactant P20, Biacore, Freiburg/Germany).

[0540] For affinity measurements CEA TCB was captured on a CM5 sensorchip surface with immobilized anti human Fab (GE Healthcare #28-9583-25). Capture IgG was coupled to the sensorchip surface by direct immobilization of around 10,000 resonance units (RU) at pH 5.0 using the standard amine coupling kit (Biacore, Freiburg/Germany).

[0541] To analyze the interaction to human CD3c stalk-Fc (knob)-Avi/CD3δ-stalk-Fc(hole) (SEQ ID NOs 378 and 379, respectively), CEA TCB was captured for 30 s at 50 nM with 10 μl/min. CD3ε/CD3δ was passed at a concentration of 0.68-500 nM with a flowrate of 30 μl/min through the flow cells over 360 s. The dissociation was monitored for 360 s.

[0542] The K_{D} value of the interaction between CEA TCB and the recombinant tumor target antigen human NABA-avi-his (containing the B3 domain of human CEA (CEACAM5) surrounded by the N, A1 and A2 domain of human CEACAM1 with a C-terminal avi 6his tag; see SEQ ID NO: 377) was determined by capturing the TCB molecule for 40 s at 10 μl/min. The antigen was flown over the flow cell for 240 s in a concentration range from 0.68 to 500 nM at a flow rate of 30 μl/min. The dissociation was measured over 240 s.

[0543] Bulk refractive index differences were corrected for by subtracting the response obtained on a reference flow cell. Here, the antigens were flown over a surface with immobilized anti-human Fab antibody but on which HBS-EP has been injected rather than CEA.

[0544] Kinetic constants were derived using the Biacore T200 Evaluation Software (vAA, Biacore AB, Uppsala/Sweden), to fit rate equations for 1:1 Langmuir binding by numerical integration. The half-life (t_{1/2}) of the interaction was calculated using following formula: t_{1/2}=ln 2/k_{off}.

[0545] The CEA TCB binds to the tumor target and CD3ε/CD3δ in the nM-range with K_{D} values of 62 nM for the human NABA and 75.3 nM for the human CD3ε/CD3δ. The half-life of the monovalent binding to NABA is 5.3 minutes, the half-life of the binding to CD3ε/CD3δ is 5.7 minutes. The kinetic values are summarized in Table 12.

TABLE 12
Affinity of CEA TCB to human NABA and human CD3ε/CD3δ (T = 25° C.).

| Antigen | TCB | kₒₙ [1/Ms] | k_{off} [1/s] | t_{1/2} [min] | K_{D} [nM] |
|---|---|---|---|---|---|
| Human | CEA TCB | 3.49 × 10⁴ | 2.18 × 10⁻³ | 5.3 | 62.4 |
| NABA | | | | | |
| Human | CEA TCB | 2.69 × 10⁴ | 2.03 × 10⁻³ | 5.7 | 75.3 |
| CD3ε/CD3δ | | | | | |

### Example 28

### Affinity of the MSCP TCB to MCSP and CD3 by Surface Plasmon Resonance (SPR)

[0546] Surface plasmon resonance (SPR) experiments were performed on a Biacore T100 at 25° C. with HBS-EP as running buffer (0.01 M HEPES pH 7.4, 0.15 M NaCl, 3 mM EDTA, 0.005% Surfactant P20, Biacore, Freiburg/Germany).

[0547] For affinity measurements MCSP TCB was captured on a CM5 sensorchip surface with immobilized anti human Fab (GE Healthcare #28-9583-25). Capture IgG was coupled to the sensorchip surface by direct immobilization of around 7,500 resonance units (RU) at pH 5.0 using the standard amine coupling kit (Biacore, Freiburg/Germany). MCSP TCB was captured for 60 s at 30 nM with 10 μl/min. Human and cynomolgus MCSP D3 (see SEQ ID NOs 376 and 375, respectively) were passed at a concentration of 0.024-50 nM with a flowrate of 30 μl/min through the flow cells over 90 s. The concentration range for human and cynomolgus CD3ε stalk-Fc (knob)-Avi/CD3δ-stalk-Fc(hole) was 1.17-600 nM. Since the interaction with murine MCSP (SEQ ID NO: 380) was expected to be weak the concentration range for this antigen was chosen between 3.9 and 500 nM. The dissociation for all interactions was monitored for 120 s. Bulk refractive index differences were corrected for by subtracting the response obtained on a reference flow cell. Here, the antigens were flown over a surface with immobilized anti-human Fab antibody but on which HBS-EP has been injected rather than MCSP TCB.

[0548] Kinetic constants were derived using the Biacore T200 Evaluation Software (vAA, Biacore AB, Uppsala/Sweden), to fit rate equations for 1:1 Langmuir binding by numerical integration. The interaction for the MCSP TCB with the murine MCSP D3 was determined in steady state. The half-life (t_{1/2}) of the interaction was calculated using following formula: t_{1/2}=ln 2/k_{off}.

[0549] The MCSP TCB binds to the tumor target in pM-range with K_{D} values of 0.15 nM for the human and 0.12 nM for the cynomolgus antigen. Recombinant CD3ε/CD3δ is bound by the MCSP TCB with a K_{D} value of 78 nM (human) and 104 nM (cynomolgus). The half-life of the monovalent binding is up to 260 minutes for the tumor target and 2.9 minutes for the CD3e/CD3d. Upon affinity maturation the MCSP antibody obtained some binding to recombinant murine MCSP D3. K_{D} value for this interaction is in mM range (1.6 mM). The kinetic values are summarized in Table 13.

TABLE 13
Affinity of MCSP TCB to the human, cynomolgus and murine MCSP D3
and human and cynomolgus CD3ε/CD3δ (T = 25° C.).

| | kₒₙ [1/Ms] | k_{off} [1/s] | t_{1/2} [min] | K_{D} [nM] |
|---|---|---|---|---|
| Human MCSP D3 | 3.89 × 10⁵ | 5.63 × 10−⁵ | 205 | 0.15 |
| Cynomolgus MCSP D3 | 3.70 × 10⁵ | 4.39 × 10−⁵ | 263 | 0.12 |
| Murine MCSP D3 | nd | nd | nd | 1570* |
| Human CD3ε/CD3δ | 4.99 × 10⁴ | 3.92 × 10⁻³ | 2.9 | 78.7 |
| Cynomolgus CD3ε/CD3δ | 4.61 × 10⁴ | 4.78 × 10⁻³ | 2.4 | 104 |

*determined by steady state measurement

### Example 29

### Thermal Stability of CEA TCB

[0550] Thermal stability of the CEA TCB was monitored by Dynamic Light Scattering (DLS). 30 μg of filtered protein sample with a protein concentration of 0.5 mg/ml was applied in duplicate to a Dynapro plate reader (Wyatt Technology Corporation; USA). The temperature was ramped from 25 to 75° C. at 0.05° C./min, with the radius and total scattering intensity being collected.

[0551] The result is shown in FIG. 87. The aggregation temperature of the CEA TCB was measured at 55° C.

### Example 30

### Thermal Stability of MCSP TCB

[0552] Thermal stability of the MCSP TCB was monitored by Dynamic Light Scattering (DLS). 30 μg of filtered protein sample with a protein concentration of 0.5 mg/ml was applied in duplicate to a Dynapro plate reader (Wyatt Technology Corporation; USA). The temperature was ramped from 25 to 75° C. at 0.05° C./min, with the radius and total scattering intensity being collected.

[0553] The result is shown in FIG. 88. The aggregation temperature of the MCSP TCB was measured at 55° C.

### Example 31

### T Cell-Mediated Killing of MCSP-Expressing Tumor Target Cells Induced by MCSP TCB and MCSP 1+1 CrossMab Antibodies

[0554] T cell-mediated killing of target cells induced by MCSP TCB and MCSP 1+1 CrossMab TCB (a T cell activating bispecific antibody having the same CD3 and MCSP binding sequences as the MCSP TCB, with the molecular format shown in FIG. 1D) antibodies was assessed on A375 (high MCSP), MV-3 (medium MCSP) and HCT-116 (low MCSP) tumor target cells. LS180 (MCSP negative tumor cell line) was used as negative control. Tumor cell killing was assessed 24 h and 48 h post incubation of target cells with the antibodies and effector cells (human PBMCs). Briefly, target cells were harvested with Trypsin/EDTA, washed, and plated at density of 25 000 cells/well using flat-bottom 96-well plates. Cells were left to adhere overnight. Peripheral blood mononuclear cells (PBMCs) were prepared by Histopaque density centrifugation of enriched lymphocyte preparations (buffy coats) obtained from healthy human donors. Fresh blood was diluted with sterile PBS and layered over Histopaque gradient (Sigma, #H8889). After centrifugation (450×g, 30 minutes, room temperature), the plasma above the PBMC-containing interphase was discarded and PBMCs transferred in a new Falcon tube subsequently filled with 50 ml of PBS. The mixture was centrifuged (400×g, 10 minutes, room temperature), the supernatant discarded and the PBMC pellet washed twice with sterile PBS (centrifugation steps 350×g, 10 minutes). The resulting PBMC population was counted automatically (ViCell) and kept in RPMI1640 medium containing 10% FCS and 1% L-alanyl-L-glutamine (Biochrom, K0302) in cell incubator (37° C., 5% CO₂) until further use (no longer than 24 h). For the killing assay, the antibodies were added at indicated concentrations (range of 0.01 pM-10 nM in triplicates). PBMCs were added to target cells at the final E:T ratio of 10:1. Target cell killing was assessed after 24 h and 48 h of incubation by quantification of LDH (lactate dehydrogenase) released into cell supernatants by apoptotic/necrotic cells (LDH detection kit, Roche Applied Science, #11 644 793 001). Maximal lysis of the target cells (=100%) was achieved by incubation of target cells with 1% Triton X-100. Minimal lysis (=0%) refers to target cells co-incubated with effector cells without bispecific antibody. The results show that MCSP TCB antibody is more potent than the MCSP 1+1 CrossMab TCB as it induced stronger killing of MCSP-positive target cells at both time points and on all tumor target cells (FIG. 89 A-H). The EC₅₀ values related to killing assays, calculated using GraphPadPrism5, are given in Table 14.

TABLE 14
MCSP receptor copy number and EC₅₀ values
(pM) for T-cell mediated killing of MCSP-expressing tumor
cells induced by MCSP TCB antibody (n.d. = not determined).

| | MCSP receptor | EC50 [pM] | EC50 [pM] |
|---|---|---|---|
| Cell line | copy number | 24 h | 48h |
| A375 | 387 058 | 0.1 | n.d. |
| MV-3 | 260 000 | 1.0 | 0.7 |
| HCT-116 | 36770 | ~6.2e−008 | ~0.09 |
| LS180 | negative | ~764 | n.d. |

### Example 32

### CD25 and CD69 Upregulation on CD8⁺ and CD4⁺ Effector Cells after T Cell-Mediated Killing of MCSP-Expressing Tumor Cells Induced by MCSP TCB and MCSP 1+1 CrossMab Antibodies

[0555] Activation of CD8⁺ and CD4⁺ T cells after T-cell killing of MCSP-expressing tumor cells (A375 and MV-3) mediated by the MCSP TCB and MCSP 1+1 CrossMab antibodies was assessed by FACS analysis using antibodies recognizing T cell activation markers CD25 (late activation marker) and CD69 (early activation marker). The antibody and the killing assay conditions were essentially as described above (Example 31), using the same antibody concentration range (0.01 pM-10 nM in triplicates), E:T ratio 10:1 and an incubation time of 48 h.

[0556] After the incubation, PBMCs were transferred to a round-bottom 96-well plate, centrifuged at 350×g for 5 min and washed twice with PBS containing 0.1% BSA. Surface staining for CD8 (FITC anti-human CD8, BD #555634), CD4 (PECy7 anti-human CD4, BD #557852), CD69 (PE anti-human CD69, Biolegend #310906) and CD25 (APC anti-human CD25, BD #555434) was performed according to the suppliers' indications. Cells were washed twice with 150 μl/well PBS containing 0.1% BSA and fixed for 15 min at 4° C. using 100 μl/well fixation buffer (BD #554655). After centrifugation, the samples were resuspended in 200 μl/well PBS 0.1% BSA containing DAPI to exclude dead cells for the FACS measurement. Samples were analyzed at BD FACS Fortessa. The results show that MCSP TCB induced a strong and target-specific upregulation of activation markers (CD25, CD69) on CD8⁺ T cells (FIG. 90 A, B (for A375 cells) and E, F (for MV-3 cells)) and CD4⁺ T cells (FIG. 90 C, D (for A375 cells) and G, H (for MV-3 cells)) after killing. As for the killing results, the activation of T cells was stronger with MCSP TCB than with MCSP 1+1 CrossMab.

### Example 33

### Preparation of DP47 GS TCB (2+1 Crossfab-IgG P329G LALA Inverted=“Untargeted TCB”) Containing DP47 GS as Non Binding Antibody and Humanized CH2527 as Anti CD3 Antibody

[0557] The “untargeted TCB” was used as a control in the above experiments. The bispecific antibody engages CD3c but does not bind to any other antigen and therefore cannot crosslink T cells to any target cells (and subsequently cannot induce any killing). It was therefore used as negative control in the assays to monitor any unspecific T cell activation.

[0558] The variable region of heavy and light chain DNA sequences were subcloned in frame with either the constant heavy chain or the constant light chain pre-inserted into the respective recipient mammalian expression vector. The antibody expression is driven by an MPSV promoter and carries a synthetic polyA signal sequence at the 3′ end of the CDS. In addition each vector contains an EBV OriP sequence.

[0559] The molecule was produced by co-transfecting HEK293 EBNA cells with the mammalian expression vectors using polyethylenimine (PEI). The cells were transfected with the corresponding expression vectors in a 1:2:1:1 ratio (“vector heavy chain Fc(hole)”:“vector light chain”:“vector light chain Crossfab”:“vector heavy chain Fc(knob)-FabCrossfab”).

[0560] For transfection HEK293 EBNA cells were cultivated in suspension serum-free in CD CHO culture medium. For the production in 500 ml shake flask 400 million HEK293 EBNA cells were seeded 24 hours before transfection. For transfection cells were centrifuged for 5 min at 210×g, supernatant is replaced by pre-warmed 20 ml CD CHO medium. Expression vectors were mixed in 20 ml CD CHO medium to a final amount of 200 μg DNA. After addition of 540 μl PEI solution the mixture was vortexed for 15 s and subsequently incubated for 10 min at room temperature. Afterwards cells were mixed with the DNA/PEI solution, transferred to a 500 ml shake flask and incubated for 3 hours at 37° C. in an incubator with a 5% CO₂ atmosphere. After the incubation time 160 ml F17 medium was added and cell were cultivated for 24 hours. One day after transfection 1 mM valproic acid and 7% Feed 1 (Lonza) was added. After 7 days cultivation supernatant was collected for purification by centrifugation for 15 min at 210×g, the solution was sterile filtered (0.22 μm filter) and sodium azide in a final concentration of 0.01% w/v was added, and kept at 4° C.

[0561] The secreted protein was purified from cell culture supernatants by affinity chromatography using Protein A. Supernatant was loaded on a HiTrap Protein A HP column (CV=5 mL, GE Healthcare) equilibrated with 40 ml 20 mM sodium phosphate, 20 mM sodium citrate, 0.5 M sodium chloride, pH 7.5. Unbound protein was removed by washing with at least 10 column volumes 20 mM sodium phosphate, 20 mM sodium citrate, 0.5 M sodium chloride, pH 7.5. Target protein was eluted during a gradient over 20 column volumes from 20 mM sodium citrate, 0.5 M sodium chloride, pH 7.5 to 20 mM sodium citrate, 0.5 M sodium chloride, pH 2.5. Protein solution was neutralized by adding 1/10 of 0.5 M sodium phosphate, pH 8. Target protein was concentrated and filtrated prior loading on a HiLoad Superdex 200 column (GE Healthcare) equilibrated with 20 mM histidine, 140 mM sodium chloride solution of pH 6.0.

[0562] The protein concentration of purified protein samples was determined by measuring the optical density (OD) at 280 nm, using the molar extinction coefficient calculated on the basis of the amino acid sequence.

[0563] Purity and molecular weight of molecules were analyzed by CE-SDS analyses in the presence and absence of a reducing agent. The Caliper LabChip GXII system (Caliper lifescience) was used according to the manufacturer's instruction. 2 μg sample was used for analyses.

[0564] The aggregate content of antibody samples was analyzed using a TSKgel G3000 SW XL analytical size-exclusion column (Tosoh) in 25 mM K₂HPO₄, 125 mM NaCl, 200 mM L-arginine monohydrochloride, 0.02% (w/v) NaN₃, pH 6.7 running buffer at 25° C.

TABLE 15
Summary production and purification of DP47 GS TCB.

| | | | Aggregate | | | |
|---|---|---|---|---|---|---|
| | | | after 1^{st} | | | |
| | Titer | Yield | purification | HMW | LMW | Monomer |
| Construct | [mg/l] | [mg/l] | step [%] | [%] | [%] | [%] |
| DP47 | 103.7 | 8.04 | 8 | 2.3 | 6.9 | 91.8 |
| GS TCB | | | | | | |

[0565] FIG. 91 and Table 16 show CE-SDS analyses of the DP47 GS TCB (2+1 Crossfab-IgG P329G LALA inverted) containing DP47 GS as non-binding antibody and humanized CH2527 as anti-CD3 antibody. (SEQ ID NOs:325, 326, 327 and 328).

TABLE 16
CE-SDS analyses of DP47 GS TCB.

| | Peak | kDa | Corresponding Chain |
|---|---|---|---|
| DP47 GS TCB | 1 | 165.22 | Molecule with 2 missing light chains |
| non reduced (A) | | | |
| | 2 | 181.35 | Molecule with 1 missing light chain |
| | 3 | 190.58 | Correct molecule without N-linked |
| | | | glycosylation |
| | 4 | 198.98 | Correct molecule |
| DP47 GS TCB | 1 | 27.86 | Light chain DP47 GS |
| reduced (B) | | | |
| | 2 | 35.74 | Light chain huCH2527 |
| | 3 | 63.57 | Fc(hole) |
| | 4 | 93.02 | Fc(knob) |

### Example 34

### Preparation of a Knob-in-Hole MCSP TCB hIgG₄ S228P/L325E Containing M4-3(C1) ML2(G3) as Anti-MCSP Antibody and Humanized CH2527 as Anti-CD3 Antibody

[0566] A knob-in-hole TCB with a human IgG₄ Fc region containing the mutations S228P and L325E (SPLE) was constructed. This TCB has M4-3(C1) ML2(G3) as anti-MCSP antibody and humanized CH2527 as anti-CD3 antibody.

[0567] The variable region of heavy and light chain DNA sequences were subcloned in frame with either the constant heavy chain or the constant light chain pre-inserted into the respective recipient mammalian expression vector. The antibody expression was driven by an MPSV promoter and carries a synthetic polyA signal sequence at the 3′ end of the CDS. In addition each vector contains an EBV OriP sequence.

[0568] The molecule was produced by co-transfecting HEK293-EBNA cells with the mammalian expression vectors using polyethylenimine (PEI). The cells were transfected with the corresponding expression vectors in a 1:1:2:1 ratio (“vector heavy chain Fc(hole)”:“vector light chain Crossfab”:“vector light chain”:“vector heavy chain Fc(knob) FabCrossfab”).

[0569] For transfection HEK293 EBNA cells were cultivated in suspension serum-free in CD CHO culture medium. For the production in 500 ml shake flask 400 million HEK293 EBNA cells were seeded 24 hours before transfection. For transfection cells were centrifuged for 5 min at 210×g, supernatant was replaced by pre-warmed 20 ml CD CHO medium. Expression vectors were mixed in 20 ml CD CHO medium to a final amount of 200 μg DNA. After addition of 540 μl PEI solution the mixture was vortexed for 15 s and subsequently incubated for 10 min at room temperature. Afterwards cells were mixed with the DNA/PEI solution, transferred to a 500 ml shake flask and incubated for 3 hours at 37° C. in an incubator with a 5% CO₂ atmosphere.

[0570] After incubation time 160 ml F17 medium was added and cells were cultivated for 24 hours. One day after transfection 1 mM valproic acid and 7% Feed 1 (Lonza) was added. After 7 days cultivation supernatant was collected for purification by centrifugation for 15 min at 210×g, the solution was sterile filtered (0.22 μm filter) and sodium azide in a final concentration of 0.01% w/v was added, and kept at 4° C.

[0571] The secreted protein was purified from cell culture supernatants by affinity chromatography using Protein A. Supernatant was loaded on a 4 ml column packed with POROS® MabCapture™ A Perfusion Chromatography®Media (CV=4 mL, Applied Biosystems) equilibrated with 36 ml 20 mM sodium phosphate, 20 mM sodium citrate, 0.5 M sodium chloride, 0.01% v/v Tween-20, pH 7.5. Unbound protein was removed by washing with at least 10 column volumes 20 mM sodium phosphate, 20 mM sodium citrate, 0.5 M sodium chloride, 0.01% v/v Tween-20, pH 7.5. Target protein was eluted during a gradient over 20 column volumes from 20 mM sodium citrate, 0.5 M sodium chloride, pH 7.5 to 20 mM sodium citrate, 0.5 M sodium chloride, 0.01% v/v Tween-20, pH 2.5. Protein solution was neutralized by adding 1/10 of 0.5 M sodium phosphate, pH 8. Target protein was concentrated and filtrated prior loading on a HiLoad Superdex 200 column (GE Healthcare) equilibrated with 20 mM histidine, 140 mM sodium chloride, 0.01% v/v Tween-20 solution of pH 6.0.

[0572] The protein concentration of purified protein samples was determined by measuring the optical density (OD) at 280 nm, using the molar extinction coefficient calculated on the basis of the amino acid sequence. Purity and molecular weight of molecules were analyzed by CE-SDS analyses in the presence and absence of a reducing agent. The Caliper LabChip GXII system (Caliper Lifescience) was used according to the manufacturer's instruction. 2 μg sample was used for analyses. The aggregate content of antibody samples was analyzed using a TSKgel G3000 SW XL analytical size-exclusion column (Tosoh) in 25 mM K₂HPO₄, 125 mM NaCl, 200 mM L-arginine monohydrochloride, 0.02% (w/v) NaN₃, pH 6.7 running buffer at 25° C.

[0573] Human IgG₄ carrying a Fc with knob into hole and SPLE mutation can be used to generate heterodimeric T cell bispecific molecules with good quality and high yield. Compared to T cell bispecifics based on hIgG₁ knob into hole P329G LALA these molecules seemed to be more stable as reflected in the higher yields and low aggregate content after the first purification step shown in Table 17.

TABLE 17
Yields, aggregate content after Protein A and final monomer content for MCSP TCB
hIgG₄ S228P/L325E.

| | | | Aggregate | LMW after | | | |
|---|---|---|---|---|---|---|---|
| | | | after 1^{st} | 1^{st} | | | |
| | Titer | Yield | purification | purification | HMW | LMW | Monomer |
| Construct | [mg/l] | [mg/l] | step [%] | step [%] | [%] | [%] | [%] |
| MCSP TCB hIgG₄ | 78.4 | 5.9 | 2.8 | 0 | 0 | 0 | 100 |
| S228P/L325E | | | | | | | |
| hIgG1 knob-in- | 157 | 0.32 | 32 | 0 | 3.3 | 0 | 96.7 |
| hole P329G | | | | | | | |
| LALA TCB | | | | | | | |

[0574] FIG. 92 shows a schematic drawing of the MCSP TCB hIgG₄ S228P/L325E (SEQ ID NOs: 278, 319, 369 and 370) molecule.

TABLE 18
CE-SDS analyses of MCSP TCB hIgG₄ S228P/L325E.

| | Peak | kDa | Corresponding Chain |
|---|---|---|---|
| MCSP TCB hIgG₄ S228P/L325E | 1 | 205.21 | Correct molecule |
| non reduced (A) | | | |
| MCSP TCB hIgG₄ S228P/L325E | 1 | 32 | Light chain ML2(G3) |
| reduced (B) | | | |
| | 2 | 40 | Light Chain huCH2527 |
| | 3 | 71 | Fab-Fc(hole SPLE) |
| | 4 | 99 | Fab-Crossfab-Fc(knob) |
| | | | SPLE |

[0575] FIG. 93 and Table 18 show CE-SDS analyses of the MCSP TCB hIgG₄ S228P/L325E molecule (SEQ ID NOs: 278, 319, 369, and 370).

### Example 35

### Binding of MCSP TCB hIgG4 S228P/L325E to MCSP- and CD3-Expressing Cells

[0576] The binding of MCSP TCB hIgG4 S228P/L325E was tested on MCSP-expressing human melanoma cell line (MV-3) and CD3-expressing immortalized T lymphocyte line (Jurkat). Briefly, cells were harvested, counted, checked for viability and resuspended at 2×10⁶ cells/ml in FACS buffer (PBS 0.1% BSA). 100 μl of cell suspension (containing 0.2×10⁶ cells) were incubated in round-bottom 96-well plate for 30 min at 4° C. with increasing concentrations of the hIgG₄ SPLE TCB (3 pM-200 nM), washed twice with cold PBS 0.1% BSA, re-incubated for further 30 min at 4° C. with the PE-conjugated AffiniPure F(ab′)2 Fragment goat anti-human IgG Fcγ Fragment Specific secondary antibody (Jackson Immuno Research Lab PE #109-116-170), washed twice with cold PBS 0.1% BSA and immediately analyzed by FACS using a FACS CantoII (Software FACS Diva). Binding curves were obtained using GraphPadPrism5 (FIG. 94 A, binding to MV-3 cells, EC₅₀=2029 pM; FIG. 94 B, binding to Jurkat cells).

### Example 36

### T-Cell Killing Induced by MCSP TCB hIgG₄ S228P/L325E

[0577] T-cell killing mediated by MCSP TCB hIgG₄ S228P/L325E was assessed using MCSP-expressing human melanoma tumor cells (MV-3) and human PBMCs at 24 hours and 48 hours of incubation. Briefly, target cells were harvested with Trypsin/EDTA, washed, and plated at a density of 25 000 cells/well using flat-bottom 96-well plates. Cells were left to adhere overnight. Peripheral blood mononuclear cells (PBMCs) were prepared by Histopaque density centrifugation of enriched lymphocyte preparations (buffy coats) obtained from healthy human donors. Fresh blood was diluted with sterile PBS and layered over Histopaque gradient (Sigma, #H8889). After centrifugation (450×g, 30 minutes, room temperature), the plasma above the PBMC-containing interphase was discarded and PBMCs transferred in a new Falcon tube subsequently filled with 50 ml of PBS. The mixture was centrifuged (400×g, 10 minutes, room temperature), the supernatant discarded and the PBMC pellet washed twice with sterile PBS (centrifugation steps 350×g, 10 minutes). The resulting PBMC population was counted automatically (ViCell) and stored in RPMI1640 medium containing 10% FCS and 1% L-alanyl-L-glutamine (Biochrom, K0302) at 37° C., 5% CO₂ in a cell incubator until further use (no longer than 24 h). For the killing assay, the antibody was added at the indicated concentrations (range of 0.02 pM-20 nM in triplicates). PBMCs were added to target cells at a final E:T ratio of 10:1. Target cell killing was assessed after 24 h and 48 h of incubation at 37° C., 5% CO₂ by quantification of LDH released into cell supernatants by apoptotic/necrotic cells (LDH detection kit, Roche Applied Science, #11 644 793 001). Maximal lysis of the target cells (=100%) was achieved by incubation of target cells with 1% Triton X-100. Minimal lysis (=0%) refers to target cells co-incubated with effector cells without bispecific construct. The results show that hIgG₄ SPLE TCB induced a strong and target-specific killing of MCSP-positive target cell lines (FIG. 95 A, B). The EC₅₀ values related to killing assays, calculated using GraphPadPrism5, are given in Table 19.

TABLE 19
EC₅₀ values (pM) for T-cell mediated killing of MCSP-expressing
tumor cells (MV-3) induced by MCSP TCB hIgG4 S228P/L325E.

| Cell line | EC₅₀ [pM] 24 h | EC₅₀ [pM] 48 h |
|---|---|---|
| MV-3 | 14.9 | 0.24 |

### Example 37

### Preparation of a Knob-in-Hole MCSP TCB hIgG₄ S228P/L325E P329GLALA Containing M4-3(C1) ML2(G3) as Anti-MCSP Antibody and Humanized CH2527 as Anti-CD3 Antibody

[0578] A knob-in-hole TCB with a human IgG₄ Fc region containing the mutations S228P and L325E (SPLE) and P329G LALA is constructed. This TCB has M4-3(C1) ML2(G3) as anti-MCSP antibody and humanized CH2527 as anti-CD3 antibody.

[0579] The variable region of heavy and light chain DNA sequences are subcloned in frame with either the constant heavy chain or the constant light chain pre-inserted into the respective recipient mammalian expression vector. The antibody expression is driven by an MPSV promoter and carries a synthetic polyA signal sequence at the 3′ end of the CDS. In addition each vector contains an EBV OriP sequence.

[0580] The molecule is produced by co-transfecting HEK293-EBNA cells with the mammalian expression vectors using polyethylenimine (PEI). The cells are transfected with the corresponding expression vectors in a 1:1:2:1 ratio (“vector heavy chain Fc(hole)”:“vector light chain Crossfab”:“vector light chain”:“vector heavy chain Fc(knob) FabCrossfab”).

[0581] For transfection HEK293 EBNA cells are cultivated in suspension serum-free in CD CHO culture medium. For the production in 500 ml shake flask 400 million HEK293 EBNA cells are seeded 24 hours before transfection. For transfection cells are centrifuged for 5 min at 210×g, supernatant is replaced by pre-warmed 20 ml CD CHO medium. Expression vectors are mixed in 20 ml CD CHO medium to a final amount of 200 μg DNA. After addition of 540 μl PEI solution the mixture is vortexed for 15 s and subsequently incubated for 10 min at room temperature. Afterwards cells are mixed with the DNA/PEI solution, transferred to a 500 ml shake flask and incubated for 3 hours by 37° C. in an incubator with a 5% CO₂ atmosphere. After incubation time 160 ml F17 medium is added and cell are cultivated for 24 hours. One day after transfection 1 mM valproic acid and 7% Feed 1 (Lonza) is added. After 7 days cultivation supernatant is collected for purification by centrifugation for 15 min at 210×g, the solution is sterile filtered (0.22 μm filter) and sodium azide in a final concentration of 0.01% w/v is added, and kept at 4° C.

[0582] The secreted protein is purified from cell culture supernatants by affinity chromatography using Protein A. Supernatant is loaded on a 4 ml column packed with POROS® MabCapture™ A Perfusion Chromatography®Media (CV=4 mL, Applied Biosystems) equilibrated with 36 ml 20 mM sodium phosphate, 20 mM sodium citrate, 0.5 M sodium chloride, 0.01% v/v Tween-20, pH 7.5. Unbound protein is removed by washing with at least 10 column volumes 20 mM sodium phosphate, 20 mM sodium citrate, 0.5 M sodium chloride, 0.01% v/v Tween-20, pH 7.5. Target protein is eluted during a gradient over 20 column volume from 20 mM sodium citrate, 0.5 M sodium chloride, pH 7.5 to 20 mM sodium citrate, 0.5 M sodium chloride, 0.01% v/v Tween-20, pH 2.5. Protein solution is neutralized by adding 1/10 of 0.5 M sodium phosphate, pH 8. Target protein is concentrated and filtrated prior to loading on a HiLoad Superdex 200 column (GE Healthcare) equilibrated with 20 mM histidine, 140 mM sodium chloride, 0.01% v/v Tween-20 solution of pH 6.0.

[0583] The protein concentration of purified protein samples is determined by measuring the optical density (OD) at 280 nm, using the molar extinction coefficient calculated on the basis of the amino acid sequence. Purity and molecular weight of molecules are analyzed by CE-SDS analyses in the presence and absence of a reducing agent. The Caliper LabChip GXII system (Caliper Lifescience) is used according to the manufacturer's instruction. 2 μg sample is used for analyses. The aggregate content of antibody samples was analyzed using a TSKgel G3000 SW XL analytical size-exclusion column (Tosoh) in 25 mM K₂HPO₄, 125 mM NaCl, 200 mM L-arginine monohydrochloride, 0.02% (w/v) NaN₃, pH 6.7 running buffer at 25° C.

### Example 38

### Binding of MCSP TCB hIgG₄ S228P/L325E P329G to MCSP- and CD3-Expressing Cells

[0584] The binding of MCSP TCB hIgG₄ S228P/L325E P329G is tested on MCSP-expressing human melanoma cell line (MV-3) and CD3-expressing immortalized T lymphocyte line (Jurkat). Briefly, cells are harvested, counted, checked for viability and resuspended at 2×10⁶ cells/ml in FACS buffer (PBS 0.1% BSA). 100 μl of cell suspension (containing 0.2×10⁶ cells) are incubated in round-bottom 96-well plate for 30 min at 4° C. with increasing concentrations of the hIgG₄ SPLE PG TCB (3 pM-200 nM), washed twice with cold PBS 0.1% BSA, re-incubated for further 30 min at 4° C. with the PE-conjugated AffiniPure F(ab′)2 Fragment goat anti-human IgG Fcγ Fragment Specific secondary antibody (Jackson Immuno Research Lab PE #109-116-170), washed twice with cold PBS 0.1% BSA and immediately analyzed by FACS using a FACS CantoII (Software FACS Diva). Binding curves are obtained using GraphPadPrism5.

### Example 39

### T-Cell Killing Induced by MCSP TCB hIgG4 S228P/L325E P329G

[0585] T-cell killing mediated by MCSP TCB hIgG₄ S228P/L325E is assessed using MCSP-expressing human melanoma tumor cells (MV-3) and human PBMCs at 24 hours and 48 hours of incubation. Briefly, target cells are harvested with Trypsin/EDTA, washed, and plated at density of 25 000 cells/well using flat-bottom 96-well plates. Cells are left to adhere overnight. Peripheral blood mononuclear cells (PBMCs) are prepared by Histopaque density centrifugation of enriched lymphocyte preparations (buffy coats) obtained from healthy human donors. Fresh blood is diluted with sterile PBS and layered over Histopaque gradient (Sigma, #H8889). After centrifugation (450×g, 30 minutes, room temperature), the plasma above the PBMC-containing interphase is discarded and PBMCs transferred in a new Falcon tube subsequently filled with 50 ml of PBS. The mixture is centrifuged (400×g, 10 minutes, room temperature), the supernatant discarded and the PBMC pellet washed twice with sterile PBS (centrifugation steps 350×g, 10 minutes). The resulting PBMC population is counted automatically (ViCell) and stored in RPMI1640 medium containing 10% FCS and 1% L-alanyl-L-glutamine (Biochrom, K0302) at 37° C., 5% CO₂ in cell incubator until further use (no longer than 24 h). For the killing assay, the antibody is added at the indicated concentrations (range of 0.02 pM-20 nM in triplicates). PBMCs are added to target cells at final E:T ratio of 10:1. Target cell killing is assessed after 24 h and 48 h of incubation at 37° C., 5% CO₂ by quantification of LDH released into cell supernatants by apoptotic/necrotic cells (LDH detection kit, Roche Applied Science, #11 644 793 001). Maximal lysis of the target cells (=100%) is achieved by incubation of target cells with 1% Triton X-100. Minimal lysis (=0%) refers to target cells co-incubated with effector cells without bispecific construct.

[0586] SEQ ID NOs: 371 and 372 are for IgG₄ SPLE PG heavy chains and SEQ ID NOs: 278 and 319 for light chains.

[0587] Although the foregoing invention has been described in some detail by way of illustration and example for purposes of clarity of understanding, the descriptions and examples should not be construed as limiting the scope of the invention. The disclosures of all patent and scientific literature cited herein are expressly incorporated in their entirety by reference.

The application's sequence listing, which the Patent Office published only in electronic form, follows.

SEQUENCE LISTING (380 sequences)

SEQ ID NO: 1 - protein, 700 aa, Artificial Sequence
  V9 (scFab)-Fc(hole) P329G LALA
DIQMTQSPSSLSASVGDRVTITCRASQDIRNYLNWYQQKPGKAPKLLIYYTSRLESGVPSRFSGSGSGTDYTLTISSLQPEDFATYYCQQGNTLPWTFGQGTKVEIKRTVAAPSVFIFPPSDEQLKSGTASVVCLLNNFYPREAKVQWKVDNALQSGNSQESVTEQDSKDSTYSLSSTLTLSKADYEKHKVYACEVTHQGLSSPVTKSFNRGECSGGGSGGGSEGGGSEGGGSEGGGSEGGGSGGGSGEVQLVESGGGLVQPGGSLRLSCAASGYSFTGYTMNWVRQAPGKGLEWVALINPYKGVSTYNQKFKDRFTISVDKSKNTAYLQMNSLRAEDTAVYYCARSGYYGDSDWYFDVWGQGTLVTVSSASTKGPSVFPLAPSSKSTSGGTAALGCLVKDYFPEPVTVSWNSGALTSGVHTFPAVLQSSGLYSLSSVVTVPSSSLGTQTYICNVNHKPSNTKVDKKVEPKSCDKTHTCPPCPAPEAAGGPSVFLFPPKPKDTLMISRTPEVTCVVVDVSHEDPEVKFNWYVDGVEVHNAKTKPREEQYNSTYRVVSVLTVLHQDWLNGKEYKCKVSNKALGAPIEKTISKAKGQPREPQVCTLPPSRDELTKNQVSLSCAVKGFYPSDIAVEWESNGQPENNYKTTPPVLDSDGSFFLVSKLTVDKSRWQQGNVFSCSVMHEALHNHYTQKSLSLSPGK

SEQ ID NO: 2 - DNA, 2103 bp, Artificial Sequence
  V9 (scFab)-Fc(hole) P329G LALA
gacatccagatgacccagagcccctctagcctgagcgccagcgtgggcgacagagtgaccatcacctgtcgggccagccaggacatcagaaactacctgaactggtatcagcagaagcccggcaaggcccccaagctgctgatctactacacctctagactggaaagcggcgtgcccagccggtttagcggcagcggctccggcaccgactacaccctgaccatcagcagcctgcagcccgaggacttcgccacctactactgccagcagggcaacacactcccctggaccttcggccagggcaccaaggtggagatcaagcgtacggtggccgctcccagcgtgttcatcttcccccccagcgacgagcagctgaagtccggcaccgccagcgtcgtgtgcctgctgaacaacttctacccccgggaggccaaggtgcagtggaaggtggacaacgccctgcagagcggcaacagccaggaaagcgtcaccgagcaggacagcaaggactccacctacagcctgagcagcaccctgaccctgagcaaggccgactacgagaagcacaaggtgtacgcctgcgaagtgacccaccagggcctgtccagccccgtgaccaagagcttcaaccggggcgagtgcagcggcggaggctctggaggcggctctgaaggcggaggaagtgagggcggaggctcagaaggcggcggaagcgaaggtggcggctctggcggcggatccggcgaggtgcagctggtcgagtccggcggaggcctggtgcagcctggcggcagcctgagactgagctgcgccgccagcggctacagcttcaccggctacaccatgaactgggtccggcaggctcctggcaagggcctcgaatgggtggccctgatcaacccctacaagggcgtgagcacctacaaccagaagttcaaggaccggttcaccatcagcgtggacaagagcaagaacaccgcctatctgcagatgaacagcctgcgggccgaggacaccgccgtgtactactgcgccagaagcggctactacggcgacagcgactggtacttcgacgtgtggggccagggcacactggtcaccgtgtccagcgctagcaccaagggcccatcggtcttccccctggcaccctcctccaagagcacctctgggggcacagcggccctgggctgcctggtcaaggactacttccccgaaccggtgacggtgtcgtggaactcaggcgccctgaccagcggcgtgcacaccttcccggctgtcctacagtcctcaggactctactccctcagcagcgtggtgaccgtgccctccagcagcttgggcacccagacctacatctgcaacgtgaatcacaagcccagcaacaccaaggtggacaagaaagttgagcccaaatcttgtgacaaaactcacacatgcccaccgtgcccagcacctgaagctgcagggggaccgtcagtcttcctcttccccccaaaacccaaggacaccctcatgatctcccggacccctgaggtcacatgcgtggtggtggacgtgagccacgaagaccctgaggtcaagttcaactggtacgtggacggcgtggaggtgcataatgccaagacaaagccgcgggaggagcagtacaacagcacgtaccgtgtggtcagcgtcctcaccgtcctgcaccaggactggctgaatggcaaggagtacaagtgcaaggtctccaacaaagccctcggcgcccccatcgagaaaaccatctccaaagccaaagggcagccccgagaaccacaggtgtgcaccctgcccccatcccgggatgagctgaccaagaaccaggtcagcctctcgtgcgcagtcaaaggcttctatcccagcgacatcgccgtggagtgggagagcaatgggcagccggagaacaactacaagaccacgcctcccgtgctggactccgacggctccttcttcctcgtgagcaagctcaccgtggacaagagcaggtggcagcaggggaacgtcttctcatgctccgtgatgcatgaggctctgcacaaccactacacgcagaagagcctctccctgtctccgggtaaatga

SEQ ID NO: 3 - protein, 442 aa, Artificial Sequence
  LC007 (VH-CH1)-Fc(knob) P329G LALA
EVQLQESGPGLVKPSQSLSLTCSVTGYSITSGYYWNWIRQFPGNKLEWMGYITYDGSNNYNPSLKNRISITRDTSKNQFFLKLNSVTTEDTATYYCADFDYWGQGTTLTVSSASTKGPSVFPLAPSSKSTSGGTAALGCLVKDYFPEPVTVSWNSGALTSGVHTFPAVLQSSGLYSLSSVVTVPSSSLGTQTYICNVNHKPSNTKVDKKVEPKSCDKTHTCPPCPAPEAAGGPSVFLFPPKPKDTLMISRTPEVTCVVVDVSHEDPEVKFNWYVDGVEVHNAKTKPREEQYNSTYRVVSVLTVLHQDWLNGKEYKCKVSNKALGAPIEKTISKAKGQPREPQVYTLPPCRDELTKNQVSLWCLVKGFYPSDIAVEWESNGQPENNYKTTPPVLDSDGSFFLYSKLTVDKSRWQQGNVFSCSVMHEALHNHYTQKSLSLSPGK

SEQ ID NO: 4 - DNA, 1329 bp, Artificial Sequence
  LC007 (VH-CH1)-Fc(knob) P329G LALA
gaggtccagctgcaggagtcaggacctggcctcgtgaaaccttctcagtctctgtctctcacctgctctgtcactggctactccatcaccagtggttattactggaactggatccggcagtttccaggaaacaagctggaatggatgggctacataacctacgacggtagcaataactacaacccatctctcaaaaatcgaatctccatcactcgtgacacatctaagaaccagtttttcctgaagttgaattctgtgactactgaggacacagctacatattactgtgcggactttgactactggggccaaggcaccactctcacagtctcctcagctagcaccaagggcccatcggtcttccccctggcaccctcctccaagagcacctctgggggcacagcggccctgggctgcctggtcaaggactacttccccgaaccggtgacggtgtcgtggaactcaggcgccctgaccagcggcgtgcacaccttcccggctgtcctacagtcctcaggactctactccctcagcagcgtggtgaccgtgccctccagcagcttgggcacccagacctacatctgcaacgtgaatcacaagcccagcaacaccaaggtggacaagaaagttgagcccaaatcttgtgacaagacccacacctgtcccccttgccctgcccctgaagctgctggtggcccttccgtgttcctgttccccccaaagcccaaggacaccctgatgatcagccggacccccgaagtgacctgcgtggtggtcgatgtgtcccacgaggaccctgaagtgaagttcaattggtacgtggacggcgtggaagtgcacaatgccaagaccaagccgcgggaggagcagtacaacagcacgtaccgtgtggtcagcgtcctcaccgtcctgcaccaggactggctgaatggcaaggagtacaagtgcaaggtctccaacaaagccctcggcgcccccatcgagaaaaccatctccaaagccaaagggcagccccgagaaccacaggtgtacaccctgcccccatgccgggatgagctgaccaagaaccaggtcagcctgtggtgcctggtcaaaggcttctatcccagcgacatcgccgtggagtgggagagcaatgggcagccggagaacaactacaagaccacgcctcccgtgctggactccgacggctccttcttcctctacagcaagctcaccgtggacaagagcaggtggcagcaggggaacgtcttctcatgctccgtgatgcatgaggctctgcacaaccactacacgcagaagagcctctccctgtctccgggtaaataa

SEQ ID NO: 5 - protein, 214 aa, Artificial Sequence
  LC007 (VL-CL)
DIVLTQSPSSLSASLGDRVTISCSASQGIRNYLNWYQQRPDGTVKLLIYYTSSLHSGVPSRFSGSGSGTDYSLTISNLEPEDIATYYCQQYSKLPWTFGGGTKLEIKRTVAAPSVFIFPPSDEQLKSGTASVVCLLNNFYPREAKVQWKVDNALQSGNSQESVTEQDSKDSTYSLSSTLTLSKADYEKHKVYACEVTHQGLSSPVTKSFNRGEC

SEQ ID NO: 6 - DNA, 645 bp, Artificial Sequence
  LC007 (VL-CL)
gatattgtgctcacacagtctccatcctccctgtctgcctctctgggagacagagtcaccatcagttgcagtgcaagtcagggcattagaaattatttaaactggtatcagcagagaccagatggaactgttaaactcctgatctattacacatcaagtttacactcaggagtcccatcaaggttcagtggcagtgggtctgggacagattattctctcaccatcagcaacctggaacctgaagatattgccacttactattgtcagcagtatagtaagcttccttggacgttcggtggaggcaccaagctggaaatcaaacgtacggtggctgcaccatctgtcttcatcttcccgccatctgatgagcagttgaaatctggaactgcctctgttgtgtgcctgctgaataacttctatcccagagaggccaaagtacagtggaaggtggataacgccctccaatcgggtaactcccaggagagtgtcacagagcaggacagcaaggacagcacctacagcctcagcagcaccctgacgctgagcaaagcagactacgagaaacacaaagtctacgcctgcgaagtcacccatcagggcctgagctcgcccgtcacaaagagcttcaacaggggagagtgttag

SEQ ID NO: 7 - protein, 704 aa, Artificial Sequence
  LC007 (scFab)-Fc(hole) P329G LALA
DIVLTQSPSSLSASLGDRVTISCSASQGIRNYLNWYQQRPDGTVKLLIYYTSSLHSGVPSRFSGSGSGTDYSLTISNLEPEDIATYYCQQYSKLPWTFGGGTKLEIKRTVAAPSVFIFPPSDEQLKSGTASVVCLLNNFYPREAKVQWKVDNALQSGNSQESVTEQDSKDSTYSLSSTLTLSKADYEKHKVYACEVTHQGLSSPVTKSFNRGECSGGGSGGGSEGGGSEGGGSEGGGSEGGGSGGGSGEVQLQESGPGLVKPSQSLSLTCSVTGYSITSGYYWNWIRQFPGNKLEWMGYITYDGSNNYNPSLKNRISITRDTSKNQFFLKLNSVTTEDTATYYCADFDYWGQGTTLTVSSASTKGPSVFPLAPSSKSTSGGTAALGCLVKDYFPEPVTVSWNSGALTSGVHTFPAVLQSSGLYSLSSVVTVPSSSLGTQTYICNVNHKPSNTKVDKKVEPKSCDGGGGSGGGGSGAQDKTHTCPPCPAPEAAGGPSVFLFPPKPKDTLMISRTPEVTCVVVDVSHEDPEVKFNWYVDGVEVHNAKTKPREEQYNSTYRVVSVLTVLHQDWLNGKEYKCKVSNKALPAPIEKTISKAKGQPREPQVCTLPPSRDELTKNQVSLSCAVKGFYPSDIAVEWESNGQPENNYKTTPPVLDSDGSFFLVSKLTVDKSRWQQGNVFSCSVMHEALHNHYTQKSLSLSPGK

SEQ ID NO: 8 - DNA, 2115 bp, Artificial Sequence
  LC007 (scFab)-Fc(hole) P329G LALA
gacatcgtgctgacccagagccctagcagcctgagcgccagcctgggcgacagagtgaccatcagctgtagcgcctcccagggcatcagaaactacctgaactggtatcagcagagacccgacggcacagtgaagctgctgatctactacaccagcagcctgcacagcggcgtgccaagcagattcagcggcagcggctccggcacagactacagcctgaccatctccaacctggaacccgaggatatcgccacctactactgccagcagtacagcaagctgccctggaccttcggcggaggcaccaagctggaaatcaagcggaccgtggccgctcccagcgtgttcatcttcccacccagcgacgagcagctgaagtccggcacagccagcgtcgtgtgcctgctgaacaacttctacccccgggaggccaaggtgcagtggaaggtggacaacgccctgcagagcggcaacagccaggaaagcgtcaccgagcaggacagcaaggactccacctacagcctgtccagcaccctgaccctgagcaaggccgactacgagaagcacaaggtgtacgcctgcgaagtgacccaccagggcctgagcagccccgtgaccaagagcttcaaccggggcgagtgtagtggcggaggctctggcggaggaagcgagggcggaggatctgaaggcggcggatctgaggggggaggcagtgaagggggaggctcagggggaggatccggcgaggtgcagctgcaggaatctggccctggcctggtcaagccaagccagagtctgagcctgacctgcagcgtgaccggctacagcattaccagcggctactactggaactggattcggcagttccccggcaataagctggaatggatgggctacatcacctacgacggcagcaacaactacaaccccagcctgaagaaccggatcagcatcacccgggacaccagcaagaaccagttcttcctgaagctgaacagcgtgaccaccgaggacaccgccacatactattgcgccgacttcgactactggggccagggcaccaccctgaccgtgtccagcgccagcacaaagggccctagcgtgttccctctggcccccagcagcaagagcacaagcggcggaacagccgccctgggctgcctcgtgaaggactacttccccgagcccgtgacagtgtcttggaacagcggagccctgacaagcggcgtgcacaccttccctgccgtgctgcagagcagcggcctgtactccctgagcagcgtggtcaccgtgcctagcagcagcctgggcacccagacctacatctgcaacgtgaaccacaagcccagcaacaccaaagtggacaagaaggtggagcccaagagctgtgatggcggaggagggtccggaggcggtggatccggagctcaggacaaaactcacacatgcccaccgtgcccagcacctgaagctgcagggggaccgtcagtcttcctcttccccccaaaacccaaggacaccctcatgatctcccggacccctgaggtcacatgcgtggtggtggacgtgagccacgaagaccctgaggtcaagttcaactggtacgtggacggcgtggaggtgcataatgccaagacaaagccgcgggaggagcagtacaacagcacgtaccgtgtggtcagcgtcctcaccgtcctgcaccaggactggctgaatggcaaggagtacaagtgcaaggtctccaacaaagccctcccagcccccatcgagaaaaccatctccaaagccaaagggcagccccgagaaccacaggtgtgcaccctgcccccatcccgggatgagctgaccaagaaccaggtcagcctctcgtgcgcagtcaaaggcttctatcccagcgacatcgccgtggagtgggagagcaatgggcagccggagaacaactacaagaccacgcctcccgtgctggactccgacggctccttcttcctcgtgagcaagctcaccgtggacaagagcaggtggcagcaggggaacgtcttctcatgctccgtgatgcatgaggctctgcacaaccactacacgcagaagagcctctccctgtctccgggtaaatga

SEQ ID NO: 9 - protein, 466 aa, Artificial Sequence
  V9 (VH-CH1) -Fc(knob) LALA
EVQLVESGGGLVQPGGSLRLSCAASGYSFTGYTMNWVRQAPGKGLEWVALINPYKGVSTYNQKFKDRFTISVDKSKNTAYLQMNSLRAEDTAVYYCARSGYYGDSDWYFDVWGQGTLVTVSSASTKGPSVFPLAPSSKSTSGGTAALGCLVKDYFPEPVTVSWNSGALTSGVHTFPAVLQSSGLYSLSSVVTVPSSSLGTQTYICNVNHKPSNTKVDKKVEPKSCDGGGGSGGGGSGAQDKTHTCPPCPAPEAAGGPSVFLFPPKPKDTLMISRTPEVTCVVVDVSHEDPEVKFNWYVDGVEVHNAKTKPREEQYNSTYRVVSVLTVLHQDWLNGKEYKCKVSNKALPAPIEKTISKAKGQPREPQVYTLPPCRDELTKNQVSLWCLVKGFYPSDIAVEWESNGQPENNYKTTPPVLDSDGSFFLYSKLTVDKSRWQQGNVFSCSVMHEALHNHYTQKSLSLSPGK

SEQ ID NO: 10 - DNA, 1401 bp, Artificial Sequence
  V9 (VH-CH1) -Fc(knob) LALA
gaggtgcagctggtcgagagcggaggcggcctggtgcagcctggcggcagcctgagactgagctgcgccgccagcggctacagcttcaccggctacaccatgaactgggtccggcaggcacctggcaagggactggaatgggtggccctgatcaacccctacaagggcgtgagcacctacaaccagaagttcaaggaccggttcaccatcagcgtggacaagagcaagaacaccgcctatctgcagatgaacagcctgcgggccgaggacaccgccgtgtactactgcgccagaagcggctactacggcgacagcgactggtacttcgacgtgtggggccagggcaccctcgtgaccgtgtctagcgctagcaccaagggcccctccgtgttccccctggcccccagcagcaagagcaccagcggcggcacagccgctctgggctgcctggtcaaggactacttccccgagcccgtgaccgtgtcctggaacagcggagccctgacctccggcgtgcacaccttccccgccgtgctgcagagttctggcctgtatagcctgagcagcgtggtcaccgtgccttctagcagcctgggcacccagacctacatctgcaacgtgaaccacaagcccagcaacaccaaggtggacaagaaggtggagcccaagagctgcgacggcggtggtggctccggaggcggtggatccggagctcaggacaaaactcacacatgcccaccgtgcccagcacctgaagctgcagggggaccgtcagtcttcctcttccccccaaaacccaaggacaccctcatgatctcccggacccctgaggtcacatgcgtggtggtggacgtgagccacgaagaccctgaggtcaagttcaactggtacgtggacggcgtggaggtgcataatgccaagacaaagccgcgggaggagcagtacaacagcacgtaccgtgtggtcagcgtcctcaccgtcctgcaccaggactggctgaatggcaaggagtacaagtgcaaggtctccaacaaagccctcccagcccccatcgagaaaaccatctccaaagccaaagggcagccccgagaaccacaggtgtacaccctgcccccatgccgggatgagctgaccaagaaccaggtcagcctgtggtgcctggtcaaaggcttctatcccagcgacatcgccgtggagtgggagagcaatgggcagccggagaacaactacaagaccacgcctcccgtgctggactccgacggctccttcttcctctacagcaagctcaccgtggacaagagcaggtggcagcaggggaacgtcttctcatgctccgtgatgcatgaggctctgcacaaccactacacgcagaagagcctctccctgtctccgggtaaatga

SEQ ID NO: 11 - protein, 214 aa, Artificial Sequence
  V9 (VL-CL)
DIQMTQSPSSLSASVGDRVTITCRASQDIRNYLNWYQQKPGKAPKLLIYYTSRLESGVPSRFSGSGSGTDYTLTISSLQPEDFATYYCQQGNTLPWTFGQGTKVEIKRTVAAPSVFIFPPSDEQLKSGTASVVCLLNNFYPREAKVQWKVDNALQSGNSQESVTEQDSKDSTYSLSSTLTLSKADYEKHKVYACEVTHQGLSSPVTKSFNRGEC

SEQ ID NO: 12 - DNA, 645 bp, Artificial Sequence
  V9 (VL-CL)
gacatccagatgacccagagccccagcagcctgagcgccagcgtgggcgacagagtgaccatcacctgtcgggccagccaggacatcagaaactacctgaactggtatcagcagaagcccggcaaggcccccaagctgctgatctactacacctctagactggaaagcggcgtgcccagccggtttagcggcagcggctccggcaccgactacaccctgaccatcagcagcctgcagcccgaggacttcgccacctactactgccagcagggcaacacactgccctggaccttcggccagggcacaaaggtggagatcaagcgtacggtggctgcaccatctgtcttcatcttcccgccatctgatgagcagttgaaatctggaactgcctctgttgtgtgcctgctgaataacttctatcccagagaggccaaagtacagtggaaggtggataacgccctccaatcgggtaactcccaggagagtgtcacagagcaggacagcaaggacagcacctacagcctcagcagcaccctgacgctgagcaaagcagactacgagaaacacaaagtctacgcctgcgaagtcacccatcagggcctgagctcgcccgtcacaaagagcttcaacaggggagagtgttag

SEQ ID NO: 13 - protein, 926 aa, Artificial Sequence [sequence omitted]

SEQ ID NO: 14 - DNA, 2781 bp, Artificial Sequence
  V9 (scFab)-LC007 (VH-CH1)-Fc(knob) wt
gacatccagatgacccagagcccctctagcctgagcgccagcgtgggcgacagagtgaccatcacctgtcgggccagccaggacatcagaaactacctgaactggtatcagcagaagcccggcaaggcccccaagctgctgatctactacacctctagactggaaagcggcgtgcccagccggtttagcggcagcggctccggcaccgactacaccctgaccatcagcagcctgcagcccgaggacttcgccacctactactgccagcagggcaacacactcccctggaccttcggccagggcaccaaggtggagatcaagcgtacggtggccgctcccagcgtgttcatcttcccccccagcgacgagcagctgaagtccggcaccgccagcgtcgtgtgcctgctgaacaacttctacccccgggaggccaaggtgcagtggaaggtggacaacgccctgcagagcggcaacagccaggaaagcgtcaccgagcaggacagcaaggactccacctacagcctgagcagcaccctgaccctgagcaaggccgactacgagaagcacaaggtgtacgcctgcgaagtgacccaccagggcctgtccagccccgtgaccaagagcttcaaccggggcgagtgcagcggcggaggctctggaggcggctctgaaggcggaggaagtgagggcggaggctcagaaggcggcggaagcgaaggtggcggctctggcggcggatccggcgaggtgcagctggtcgagtccggcggaggcctggtgcagcctggcggcagcctgagactgagctgcgccgccagcggctacagcttcaccggctacaccatgaactgggtccggcaggctcctggcaagggcctcgaatgggtggccctgatcaacccctacaagggcgtgagcacctacaaccagaagttcaaggaccggttcaccatcagcgtggacaagagcaagaacaccgcctatctgcagatgaacagcctgcgggccgaggacaccgccgtgtactactgcgccagaagcggctactacggcgacagcgactggtacttcgacgtgtggggccagggcacactggtcaccgtgtccagcgctagcaccaagggcccctccgtgttccccctggcccccagcagcaagagcaccagcggcggcacagccgccctcggctgcctggtcaaggactacttccccgagcccgtgaccgtgtcctggaacagcggagccctgacctccggcgtgcacaccttccccgccgtgctgcagagcagcggcctgtacagcctgtccagcgtggtcaccgtgccctccagcagcctgggcacccagacctacatctgcaacgtgaaccacaagcccagcaataccaaggtggacaagaaggtggagcccaagagctgcgacggcggtggtggctccggaggcggtggatctgaagtgcagctgcaggaaagcggccctggcctggtcaagcccagccagagcctgagcctgacctgtagcgtgaccggctactccatcacctccggctactactggaattggattcggcagttccccggcaacaagctggaatggatgggctacatcacctacgacggcagcaacaactacaaccccagcctgaagaaccggatcagcatcacccgggacaccagcaagaaccagttcttcctgaagttgaattctgtgactactgaggacacagctacatattactgtgcggactttgactactggggccaaggcaccactctcacagtctcctcagctagcaccaagggcccatcggtcttccccctggcaccctcctccaagagcacctctgggggcacagcggccctgggctgcctggtcaaggactacttccccgaaccggtgacggtgtcgtggaactcaggcgccctgaccagcggcgtgcacaccttcccggctgtcctacagtcctcaggactctactccctcagcagcgtggtgaccgtgccctccagcagcttgggcacccagacctacatctgcaacgtgaatcacaagcccagcaacaccaaggtggacaagaaagttgagcccaaatcttgtgacaaaactcacacatgcccaccgtgcccagcacctgaactcctggggggaccgtcagtcttcctcttccccccaaaacccaaggacaccctcatgatctcccggacccctgaggtcacatgcgtggtggtggacgtgagccacgaagaccctgaggtcaagttcaactggtacgtggacggcgtggaggtgcataatgccaagacaaagccgcgggaggagcagtacaacagcacgtaccgtgtggtcagcgtcctcaccgtcctgcaccaggactggctgaatggcaaggagtacaagtgcaaggtctccaacaaagccctcccagcccccatcgagaaaaccatctccaaagccaaagggcagccccgagaaccacaggtgtacaccctgcccccatgccgggatgagctgaccaagaaccaggtcagcctgtggtgcctggtcaaaggcttctatcccagcgacatcgccgtggagtgggagagcaatgggcagccggagaacaactacaagaccacgcctcccgtgctggactccgacggctccttcttcctctacagcaagctcaccgtggacaagagcaggtggcagcaggggaacgtcttctcatgctccgtgatgcatgaggctctgcacaaccactacacgcagaagagcctctccctgtctccgggtaaatga

SEQ ID NO: 15 - protein, 442 aa, Artificial Sequence
  LC007 (VH-CH1)-Fc(hole) wt
EVQLQESGPGLVKPSQSLSLTCSVTGYSITSGYYWNWIRQFPGNKLEWMGYITYDGSNNYNPSLKNRISITRDTSKNQFFLKLNSVTTEDTATYYCADFDYWGQGTTLTVSSASTKGPSVFPLAPSSKSTSGGTAALGCLVKDYFPEPVTVSWNSGALTSGVHTFPAVLQSSGLYSLSSVVTVPSSSLGTQTYICNVNHKPSNTKVDKKVEPKSCDKTHTCPPCPAPELLGGPSVFLFPPKPKDTLMISRTPEVTCVVVDVSHEDPEVKFNWYVDGVEVHNAKTKPREEQYNSTYRVVSVLTVLHQDWLNGKEYKCKVSNKALPAPIEKTISKAKGQPREPQVCTLPPSRDELTKNQVSLSCAVKGFYPSDIAVEWESNGQPENNYKTTPPVLDSDGSFFLVSKLTVDKSRWQQGNVFSCSVMHEALHNHYTQKSLSLSPGK

SEQ ID NO: 16 - DNA, 1329 bp, Artificial Sequence
  LC007 (VH-CH1)-Fc(hole) wt
gaggtccagctgcaggagtcaggacctggcctcgtgaaaccttctcagtctctgtctctcacctgctctgtcactggctactccatcaccagtggttattactggaactggatccggcagtttccaggaaacaagctggaatggatgggctacataacctacgacggtagcaataactacaacccatctctcaaaaatcgaatctccatcactcgtgacacatctaagaaccagtttttcctgaagttgaattctgtgactactgaggacacagctacatattactgtgcggactttgactactggggccaaggcaccactctcacagtctcctcagctagcaccaagggcccaagcgtgttccctctggcccccagcagcaagagcacaagcggcggaacagccgccctgggctgcctggtcaaggactacttccccgagcccgtgacagtgtcctggaacagcggagccctgaccagcggcgtgcacacctttccagccgtgctgcagagcagcggcctgtacagcctgagcagcgtggtcacagtgcctagcagcagcctgggcacccagacctacatctgcaacgtgaaccacaagcccagcaacaccaaggtggacaagaaggtggagcccaagagctgcgacaagacccacacctgtcccccttgtcctgcccctgagctgctgggcggacccagcgtgttcctgttccccccaaagcccaaggacaccctgatgatcagccggacccccgaagtgacctgcgtggtggtggacgtgtcccacgaggaccctgaagtgaagttcaattggtacgtggacggcgtggaggtgcacaatgccaagaccaagccccgggaggaacagtacaacagcacctaccgggtggtgtccgtgctgaccgtgctgcaccaggactggctgaacggcaaagagtacaagtgcaaggtctccaacaaggccctgcctgcccccatcgagaaaaccatcagcaaggccaagggccagcccagagaaccccaggtgtgcaccctgccccccagcagagatgagctgaccaagaaccaggtgtccctgagctgtgccgtcaagggcttctaccccagcgatatcgccgtggagtgggagagcaacggccagcctgagaacaactacaagaccaccccccctgtgctggacagcgacggcagcttcttcctggtgtccaaactgaccgtggacaagagccggtggcagcagggcaacgtgttcagctgcagcgtgatgcacgaggccctgcacaaccactacacccagaagtccctgagcctgagccccggcaagtga

SEQ ID NO: 17 - protein, 926 aa, Artificial Sequence
  V9 (scFab)-LC007 (VH-CH1)-Fc(knob) LALA
DIQMTQSPSSLSASVGDRVTITCRASQDIRNYLNWYQQKPGKAPKLLIYYTSRLESGVPSRFSGSGSGTDYTLTISSLQPEDFATYYCQQGNTLPWTFGQGTKVEIKRTVAAPSVFIFPPSDEQLKSGTASVVCLLNNFYPREAKVQWKVDNALQSGNSQESVTEQDSKDSTYSLSSTLTLSKADYEKHKVYACEVTHQGLSSPVTKSFNRGECSGGGSGGGSEGGGSEGGGSEGGGSEGGGSGGGSGEVQLVESGGGLVQPGGSLRLSCAASGYSFTGYTMNWVRQAPGKGLEWVALINPYKGVSTYNQKFKDRFTISVDKSKNTAYLQMNSLRAEDTAVYYCARSGYYGDSDWYFDVWGQGTLVTVSSASTKGPSVFPLAPSSKSTSGGTAALGCLVKDYFPEPVTVSWNSGALTSGVHTFPAVLQSSGLYSLSSVVTVPSSSLGTQTYICNVNHKPSNTKVDKKVEPKSCDGGGGSGGGGSEVQLQESGPGLVKPSQSLSLTCSVTGYSITSGYYWNWIRQFPGNKLEWMGYITYDGSNNYNPSLKNRISITRDTSKNQFFLKLNSVTTEDTATYYCADFDYWGQGTTLTVSSASTKGPSVFPLAPSSKSTSGGTAALGCLVKDYFPEPVTVSWNSGALTSGVHTFPAVLQSSGLYSLSSVVTVPSSSLGTQTYICNVNHKPSNTKVDKKVEPKSCDKTHTCPPCPAPEAAGGPSVFLFPPKPKDTLMISRTPEVTCVVVDVSHEDPEVKFNWYVDGVEVHNAKTKPREEQYNSTYRVVSVLTVLHQDWLNGKEYKCKVSNKALPAPIEKTISKAKGQPREPQVYTLPPCRDELTKNQVSLWCLVKGFYPSDIAVEWESNGQPENNYKTTPPVLDSDGSFFLYSKLTVDKSRWQQGNVFSCSVMHEALHNHYTQKSLSLSPGK

SEQ ID NO: 18 - DNA, 2781 bp, Artificial Sequence
  V9 (scFab)-LC007 (VH-CH1)-Fc(knob) LALA
gacatccagatgacccagagcccctctagcctgagcgccagcgtgggcgacagagtgaccatcacctgtcgggccagccaggacatcagaaactacctgaactggtatcagcagaagcccggcaaggcccccaagctgctgatctactacacctctagactggaaagcggcgtgcccagccggtttagcggcagcggctccggcaccgactacaccctgaccatcagcagcctgcagcccgaggacttcgccacctactactgccagcagggcaacacactcccctggaccttcggccagggcaccaaggtggagatcaagcgtacggtggccgctcccagcgtgttcatcttcccccccagcgacgagcagctgaagtccggcaccgccagcgtcgtgtgcctgctgaacaacttctacccccgggaggccaaggtgcagtggaaggtggacaacgccctgcagagcggcaacagccaggaaagcgtcaccgagcaggacagcaaggactccacctacagcctgagcagcaccctgaccctgagcaaggccgactacgagaagcacaaggtgtacgcctgcgaagtgacccaccagggcctgtccagccccgtgaccaagagcttcaaccggggcgagtgcagcggcggaggctctggaggcggctctgaaggcggaggaagtgagggcggaggctcagaaggcggcggaagcgaaggtggcggctctggcggcggatccggcgaggtgcagctggtcgagtccggcggaggcctggtgcagcctggcggcagcctgagactgagctgcgccgccagcggctacagcttcaccggctacaccatgaactgggtccggcaggctcctggcaagggcctcgaatgggtggccctgatcaacccctacaagggcgtgagcacctacaaccagaagttcaaggaccggttcaccatcagcgtggacaagagcaagaacaccgcctatctgcagatgaacagcctgcgggccgaggacaccgccgtgtactactgcgccagaagcggctactacggcgacagcgactggtacttcgacgtgtggggccagggcacactggtcaccgtgtccagcgctagcaccaagggcccctccgtgttccccctggcccccagcagcaagagcaccagcggcggcacagccgccctcggctgcctggtcaaggactacttccccgagcccgtgaccgtgtcctggaacagcggagccctgacctccggcgtgcacaccttccccgccgtgctgcagagcagcggcctgtacagcctgtccagcgtggtcaccgtgccctccagcagcctgggcacccagacctacatctgcaacgtgaaccacaagcccagcaataccaaggtggacaagaaggtggagcccaagagctgcgacggcggtggtggctccggaggcggtggatctgaagtgcagctgcaggaaagcggccctggcctggtcaagcccagccagagcctgagcctgacctgtagcgtgaccggctactccatcacctccggctactactggaattggattcggcagttccccggcaacaagctggaatggatgggctacatcacctacgacggcagcaacaactacaaccccagcctgaagaaccggatcagcatcacccgggacaccagcaagaaccagttcttcctgaagttgaattctgtgactactgaggacacagctacatattactgtgcggactttgactactggggccaaggcaccactctcacagtctcctcagctagcaccaagggcccatcggtcttccccctggcaccctcctccaagagcacctctgggggcacagcggccctgggctgcctggtcaaggactacttccccgaaccggtgacggtgtcgtggaactcaggcgccctgaccagcggcgtgcacaccttcccggctgtcctacagtcctcaggactctactccctcagcagcgtggtgaccgtgccctccagcagcttgggcacccagacctacatctgcaacgtgaatcacaagcccagcaacaccaaggtggacaagaaagttgagcccaaatcttgtgacaaaactcacacatgcccaccgtgcccagcacctgaagctgcagggggaccgtcagtcttcctcttccccccaaaacccaaggacaccctcatgatctcccggacccctgaggtcacatgcgtggtggtggacgtgagccacgaagaccctgaggtcaagttcaactggtacgtggacggcgtggaggtgcataatgccaagacaaagccgcgggaggagcagtacaacagcacgtaccgtgtggtcagcgtcctcaccgtcctgcaccaggactggctgaatggcaaggagtacaagtgcaaggtctccaacaaagccctcccagcccccatcgagaaaaccatctccaaagccaaagggcagccccgagaaccacaggtgtacaccctgcccccatgccgggatgagctgaccaagaaccaggtcagcctgtggtgcctggtcaaaggcttctatcccagcgacatcgccgtggagtgggagagcaatgggcagccggagaacaactacaagaccacgcctcccgtgctggactccgacggctccttcttcctctacagcaagctcaccgtggacaagagcaggtggcagcaggggaacgtcttctcatgctccgtgatgcatgaggctctgcacaaccactacacgcagaagagcctctccctgtctccgggtaaatga

SEQ ID NO: 19 - protein, 442 aa, Artificial Sequence
  LC007 (VH-CH1)-Fc(hole) LALA
EVQLQESGPGLVKPSQSLSLTCSVTGYSITSGYYWNWIRQFPGNKLEWMGYITYDGSNNYNPSLKNRISITRDTSKNQFFLKLNSVTTEDTATYYCADFDYWGQGTTLTVSSASTKGPSVFPLAPSSKSTSGGTAALGCLVKDYFPEPVTVSWNSGALTSGVHTFPAVLQSSGLYSLSSVVTVPSSSLGTQTYICNVNHKPSNTKVDKKVEPKSCDKTHTCPPCPAPEAAGGPSVFLFPPKPKDTLMISRTPEVTCVVVDVSHEDPEVKFNWYVDGVEVHNAKTKPREEQYNSTYRVVSVLTVLHQDWLNGKEYKCKVSNKALPAPIEKTISKAKGQPREPQVCTLPPSRDELTKNQVSLSCAVKGFYPSDIAVEWESNGQPENNYKTTPPVLDSDGSFFLVSKLTVDKSRWQQGNVFSCSVMHEALHNHYTQKSLSLSPGK

SEQ ID NO: 20 - DNA, 1329 bp, Artificial Sequence
  LC007 (VH-CH1)-Fc(hole) LALA
gaggtccagctgcaggagtcaggacctggcctcgtgaaaccttctcagtctctgtctctcacctgctctgtcactggctactccatcaccagtggttattactggaactggatccggcagtttccaggaaacaagctggaatggatgggctacataacctacgacggtagcaataactacaacccatctctcaaaaatcgaatctccatcactcgtgacacatctaagaaccagtttttcctgaagttgaattctgtgactactgaggacacagctacatattactgtgcggactttgactactggggccaaggcaccactctcacagtctcctcagctagcaccaagggcccatcggtcttccccctggcaccctcctccaagagcacctctgggggcacagcggccctgggctgcctggtcaaggactacttccccgaaccggtgacggtgtcgtggaactcaggcgccctgaccagcggcgtgcacaccttcccggctgtcctacagtcctcaggactctactccctcagcagcgtggtgaccgtgccctccagcagcttgggcacccagacctacatctgcaacgtgaatcacaagcccagcaacaccaaggtggacaagaaagttgagcccaaatcttgtgacaaaactcacacatgcccaccgtgcccagcacctgaagctgcagggggaccgtcagtcttcctcttccccccaaaacccaaggacaccctcatgatctcccggacccctgaggtcacatgcgtggtggtggacgtgagccacgaagaccctgaggtcaagttcaactggtacgtggacggcgtggaggtgcataatgccaagacaaagccgcgggaggagcagtacaacagcacgtaccgtgtggtcagcgtcctcaccgtcctgcaccaggactggctgaatggcaaggagtacaagtgcaaggtctccaacaaagccctcccagcccccatcgagaaaaccatctccaaagccaaagggcagccccgagaaccacaggtgtgcaccctgcccccatcccgggatgagctgaccaagaaccaggtcagcctctcgtgcgcagtcaaaggcttctatcccagcgacatcgccgtggagtgggagagcaatgggcagccggagaacaactacaagaccacgcctcccgtgctggactccgacggctccttcttcctcgtgagcaagctcaccgtggacaagagcaggtggcagcaggggaacgtcttctcatgctccgtgatgcatgaggctctgcacaaccactacacgcagaagagcctctccctgtctccgggtaaatga

SEQ ID NO: 21 - protein, 926 aa, Artificial Sequence
  V9 (scFab)-LC007 (VH-CH1)-Fc(knob) P329G LALA
DIQMTQSPSSLSASVGDRVTITCRASQDIRNYLNWYQQKPGKAPKLLIYYTSRLESGVPSRFSGSGSGTDYTLTISSLQPEDFATYYCQQGNTLPWTFGQGTKVEIKRTVAAPSVFIFPPSDEQLKSGTASVVCLLNNFYPREAKVQWKVDNALQSGNSQESVTEQDSKDSTYSLSSTLTLSKADYEKHKVYACEVTHQGLSSPVTKSFNRGECSGGGSGGGSEGGGSEGGGSEGGGSEGGGSGGGSGEVQLVESGGGLVQPGGSLRLSCAASGYSFTGYTMNWVRQAPGKGLEWVALINPYKGVSTYNQKFKDRFTISVDKSKNTAYLQMNSLRAEDTAVYYCARSGYYGDSDWYFDVWGQGTLVTVSSASTKGPSVFPLAPSSKSTSGGTAALGCLVKDYFPEPVTVSWNSGALTSGVHTFPAVLQSSGLYSLSSVVTVPSSSLGTQTYICNVNHKPSNTKVDKKVEPKSCDGGGGSGGGGSEVQLQESGPGLVKPSQSLSLTCSVTGYSITSGYYWNWIRQFPGNKLEWMGYITYDGSNNYNPSLKNRISITRDTSKNQFFLKLNSVTTEDTATYYCADFDYWGQGTTLTVSSASTKGPSVFPLAPSSKSTSGGTAALGCLVKDYFPEPVTVSWNSGALTSGVHTFPAVLQSSGLYSLSSVVTVPSSSLGTQTYICNVNHKPSNTKVDKKVEPKSCDKTHTCPPCPAPEAAGGPSVFLFPPKPKDTLMISRTPEVTCVVVDVSHEDPEVKFNWYVDGVEVHNAKTKPREEQYNSTYRVVSVLTVLHQDWLNGKEYKCKVSNKALGAPIEKTISKAKGQPREPQVYTLPPCRDELTKNQVSLWCLVKGFYPSDIAVEWESNGQPENNYKTTPPVLDSDGSFFLYSKLTVDKSRWQQGNVFSCSVMHEALHNHYTQKSLSLSPGK

SEQ ID NO: 22 - DNA, 2781 bp, Artificial Sequence
  V9 (scFab)-LC007 (VH-CH1)-Fc(knob) P329G LALA
gacatccagatgacccagagcccctctagcctgagcgccagcgtgggcgacagagtgaccatcacctgtcgggccagccaggacatcagaaactacctgaactggtatcagcagaagcccggcaaggcccccaagctgctgatctactacacctctagactggaaagcggcgtgcccagccggtttagcggcagcggctccggcaccgactacaccctgaccatcagcagcctgcagcccgaggacttcgccacctactactgccagcagggcaacacactcccctggaccttcggccagggcaccaaggtggagatcaagcgtacggtggccgctcccagcgtgttcatcttcccccccagcgacgagcagctgaagtccggcaccgccagcgtcgtgtgcctgctgaacaacttctacccccgggaggccaaggtgcagtggaaggtggacaacgccctgcagagcggcaacagccaggaaagcgtcaccgagcaggacagcaaggactccacctacagcctgagcagcaccctgaccctgagcaaggccgactacgagaagcacaaggtgtacgcctgcgaagtgacccaccagggcctgtccagccccgtgaccaagagcttcaaccggggcgagtgcagcggcggaggctctggaggcggctctgaaggcggaggaagtgagggcggaggctcagaaggcggcggaagcgaaggtggcggctctggcggcggatccggcgaggtgcagctggtcgagtccggcggaggcctggtgcagcctggcggcagcctgagactgagctgcgccgccagcggctacagcttcaccggctacaccatgaactgggtccggcaggctcctggcaagggcctcgaatgggtggccctgatcaacccctacaagggcgtgagcacctacaaccagaagttcaaggaccggttcaccatcagcgtggacaagagcaagaacaccgcctatctgcagatgaacagcctgcgggccgaggacaccgccgtgtactactgcgccagaagcggctactacggcgacagcgactggtacttcgacgtgtggggccagggcacactggtcaccgtgtccagcgctagcaccaagggcccctccgtgttccccctggcccccagcagcaagagcaccagcggcggcacagccgccctcggctgcctggtcaaggactacttccccgagcccgtgaccgtgtcctggaacagcggagccctgacctccggcgtgcacaccttccccgccgtgctgcagagcagcggcctgtacagcctgtccagcgtggtcaccgtgccctccagcagcctgggcacccagacctacatctgcaacgtgaaccacaagcccagcaataccaaggtggacaagaaggtggagcccaagagctgcgacggcggtggtggctccggaggcggtggatctgaagtgcagctgcaggaaagcggccctggcctggtcaagcccagccagagcctgagcctgacctgtagcgtgaccggctactccatcacctccggctactactggaattggattcggcagttccccggcaacaagctggaatggatgggctacatcacctacgacggcagcaacaactacaaccccagcctgaagaaccggatcagcatcacccgggacaccagcaagaaccagttcttcctgaagttgaattctgtgactactgaggacacagctacatattactgtgcggactttgactactggggccaaggcaccactctcacagtctcctcagctagcaccaagggcccatcggtcttccccctggcaccctcctccaagagcacctctgggggcacagcggccctgggctgcctggtcaaggactacttccccgaaccggtgacggtgtcgtggaactcaggcgccctgaccagcggcgtgcacaccttcccggctgtcctacagtcctcaggactctactccctcagcagcgtggtgaccgtgccctccagcagcttgggcacccagacctacatctgcaacgtgaatcacaagcccagcaacaccaaggtggacaagaaagttgagcccaaatcttgtgacaaaactcacacatgcccaccgtgcccagcacctgaagctgcagggggaccgtcagtcttcctcttccccccaaaacccaaggacaccctcatgatctcccggacccctgaggtcacatgcgtggtggtggacgtgagccacgaagaccctgaggtcaagttcaactggtacgtggacggcgtggaggtgcataatgccaagacaaagccgcgggaggagcagtacaacagcacgtaccgtgtggtcagcgtcctcaccgtcctgcaccaggactggctgaatggcaaggagtacaagtgcaaggtctccaacaaagccctcggcgcccccatcgagaaaaccatctccaaagccaaagggcagccccgagaaccacaggtgtacaccctgcccccatgccgggatgagctgaccaagaaccaggtcagcctgtggtgcctggtcaaaggcttctatcccagcgacatcgccgtggagtgggagagcaatgggcagccggagaacaactacaagaccacgcctcccgtgctggactccgacggctccttcttcctctacagcaagctcaccgtggacaagagcaggtggcagcaggggaacgtcttctcatgctccgtgatgcatgaggctctgcacaaccactacacgcagaagagcctctccctgtctccgggtaaatga

SEQ ID NO: 23 - protein, 442 aa, Artificial Sequence
  LC007 (VH-CH1)-Fc(hole) P329G LALA
EVQLQESGPGLVKPSQSLSLTCSVTGYSITSGYYWNWIRQFPGNKLEWMGYITYDGSNNYNPSLKNRISITRDTSKNQFFLKLNSVTTEDTATYYCADFDYWGQGTTLTVSSASTKGPSVFPLAPSSKSTSGGTAALGCLVKDYFPEPVTVSWNSGALTSGVHTFPAVLQSSGLYSLSSVVTVPSSSLGTQTYICNVNHKPSNTKVDKKVEPKSCDKTHTCPPCPAPEAAGGPSVFLFPPKPKDTLMISRTPEVTCVVVDVSHEDPEVKFNWYVDGVEVHNAKTKPREEQYNSTYRVVSVLTVLHQDWLNGKEYKCKVSNKALGAPIEKTISKAKGQPREPQVCTLPPSRDELTKNQVSLSCAVKGFYPSDIAVEWESNGQPENNYKTTPPVLDSDGSFFLVSKLTVDKSRWQQGNVFSCSVMHEALHNHYTQKSLSLSPGK

SEQ ID NO: 24 - DNA, 1329 bp, Artificial Sequence
  LC007 (VH-CH1)-Fc(hole) P329G LALA
gaggtccagctgcaggagtcaggacctggcctcgtgaaaccttctcagtctctgtctctcacctgctctgtcactggctactccatcaccagtggttattactggaactggatccggcagtttccaggaaacaagctggaatggatgggctacataacctacgacggtagcaataactacaacccatctctcaaaaatcgaatctccatcactcgtgacacatctaagaaccagtttttcctgaagttgaattctgtgactactgaggacacagctacatattactgtgcggactttgactactggggccaaggcaccactctcacagtctcctcagctagcaccaagggcccatcggtcttccccctggcaccctcctccaagagcacctctgggggcacagcggccctgggctgcctggtcaaggactacttccccgaaccggtgacggtgtcgtggaactcaggcgccctgaccagcggcgtgcacaccttcccggctgtcctacagtcctcaggactctactccctcagcagcgtggtgaccgtgccctccagcagcttgggcacccagacctacatctgcaacgtgaatcacaagcccagcaacaccaaggtggacaagaaagttgagcccaaatcttgtgacaaaactcacacatgcccaccgtgcccagcacctgaagctgcagggggaccgtcagtcttcctcttccccccaaaacccaaggacaccctcatgatctcccggacccctgaggtcacatgcgtggtggtggacgtgagccacgaagaccctgaggtcaagttcaactggtacgtggacggcgtggaggtgcataatgccaagacaaagccgcgggaggagcagtacaacagcacgtaccgtgtggtcagcgtcctcaccgtcctgcaccaggactggctgaatggcaaggagtacaagtgcaaggtctccaacaaagccctcggcgcccccatcgagaaaaccatctccaaagccaaagggcagccccgagaaccacaggtgtgcaccctgcccccatcccgggatgagctgaccaagaaccaggtcagcctctcgtgcgcagtcaaaggcttctatcccagcgacatcgccgtggagtgggagagcaatgggcagccggagaacaactacaagaccacgcctcccgtgctggactccgacggctccttcttcctcgtgagcaagctcaccgtggacaagagcaggtggcagcaggggaacgtcttctcatgctccgtgatgcatgaggctctgcacaaccactacacgcagaagagcctctccctgtctccgggtaaatga

SEQ ID NO: 25 - protein, 926 aa, Artificial Sequence
  V9 (scFab)-LC007 (VH-CH1)-Fc(knob) P329G LALA N297D
DIQMTQSPSSLSASVGDRVTITCRASQDIRNYLNWYQQKPGKAPKLLIYYTSRLESGVPSRFSGSGSGTDYTLTISSLQPEDFATYYCQQGNTLPWTFGQGTKVEIKRTVAAPSVFIFPPSDEQLKSGTASVVCLLNNFYPREAKVQWKVDNALQSGNSQESVTEQDSKDSTYSLSSTLTLSKADYEKHKVYACEVTHQGLSSPVTKSFNRGECSGGGSGGGSEGGGSEGGGSEGGGSEGGGSGGGSGEVQLVESGGGLVQPGGSLRLSCAASGYSFTGYTMNWVRQAPGKGLEWVALINPYKGVSTYNQKFKDRFTISVDKSKNTAYLQMNSLRAEDTAVYYCARSGYYGDSDWYFDVWGQGTLVTVSSASTKGPSVFPLAPSSKSTSGGTAALGCLVKDYFPEPVTVSWNSGALTSGVHTFPAVLQSSGLYSLSSVVTVPSSSLGTQTYICNVNHKPSNTKVDKKVEPKSCDGGGGSGGGGSEVQLQESGPGLVKPSQSLSLTCSVTGYSITSGYYWNWIRQFPGNKLEWMGYITYDGSNNYNPSLKNRISITRDTSKNQFFLKLNSVTTEDTATYYCADFDYWGQGTTLTVSSASTKGPSVFPLAPSSKSTSGGTAALGCLVKDYFPEPVTVSWNSGALTSGVHTFPAVLQSSGLYSLSSVVTVPSSSLGTQTYICNVNHKPSNTKVDKKVEPKSCDKTHTCPPCPAPEAAGGPSVFLFPPKPKDTLMISRTPEVTCVVVDVSHEDPEVKFNWYVDGVEVHNAKTKPREEQYDSTYRVVSVLTVLHQDWLNGKEYKCKVSNKALGAPIEKTISKAKGQPREPQVYTLPPCRDELTKNQVSLWCLVKGFYPSDIAVEWESNGQPENNYKTTPPVLDSDGSFFLYSKLTVDKSRWQQGNVFSCSVMHEALHNHYTQKSLSLSPGK

SEQ ID NO: 26 - DNA, 2781 bp, Artificial Sequence
  V9 (scFab)-LC007 (VH-CH1)-Fc(knob) P329G LALA N297D
gacatccagatgacccagagcccctctagcctgagcgccagcgtgggcgacagagtgaccatcacctgtcgggccagccaggacatcagaaactacctgaactggtatcagcagaagcccggcaaggcccccaagctgctgatctactacacctctagactggaaagcggcgtgcccagccggtttagcggcagcggctccggcaccgactacaccctgaccatcagcagcctgcagcccgaggacttcgccacctactactgccagcagggcaacacactcccctggaccttcggccagggcaccaaggtggagatcaagcgtacggtggccgctcccagcgtgttcatcttcccccccagcgacgagcagctgaagtccggcaccgccagcgtcgtgtgcctgctgaacaacttctacccccgggaggccaaggtgcagtggaaggtggacaacgccctgcagagcggcaacagccaggaaagcgtcaccgagcaggacagcaaggactccacctacagcctgagcagcaccctgaccctgagcaaggccgactacgagaagcacaaggtgtacgcctgcgaagtgacccaccagggcctgtccagccccgtgaccaagagcttcaaccggggcgagtgcagcggcggaggctctggaggcggctctgaaggcggaggaagtgagggcggaggctcagaaggcggcggaagcgaaggtggcggctctggcggcggatccggcgaggtgcagctggtcgagtccggcggaggcctggtgcagcctggcggcagcctgagactgagctgcgccgccagcggctacagcttcaccggctacaccatgaactgggtccggcaggctcctggcaagggcctcgaatgggtggccctgatcaacccctacaagggcgtgagcacctacaaccagaagttcaaggaccggttcaccatcagcgtggacaagagcaagaacaccgcctatctgcagatgaacagcctgcgggccgaggacaccgccgtgtactactgcgccagaagcggctactacggcgacagcgactggtacttcgacgtgtggggccagggcacactggtcaccgtgtccagcgctagcaccaagggcccctccgtgttccccctggcccccagcagcaagagcaccagcggcggcacagccgccctcggctgcctggtcaaggactacttccccgagcccgtgaccgtgtcctggaacagcggagccctgacctccggcgtgcacaccttccccgccgtgctgcagagcagcggcctgtacagcctgtccagcgtggtcaccgtgccctccagcagcctgggcacccagacctacatctgcaacgtgaaccacaagcccagcaataccaaggtggacaagaaggtggagcccaagagctgcgacggcggtggtggctccggaggcggtggatctgaagtgcagctgcaggaaagcggccctggcctggtcaagcccagccagagcctgagcctgacctgtagcgtgaccggctactccatcacctccggctactactggaattggattcggcagttccccggcaacaagctggaatggatgggctacatcacctacgacggcagcaacaactacaaccccagcctgaagaaccggatcagcatcacccgggacaccagcaagaaccagttcttcctgaagttgaattctgtgactactgaggacacagctacatattactgtgcggactttgactactggggccaaggcaccactctcacagtctcctcagctagcaccaagggcccatcggtcttccccctggcaccctcctccaagagcacctctgggggcacagcggccctgggctgcctggtcaaggactacttccccgaaccggtgacggtgtcgtggaactcaggcgccctgaccagcggcgtgcacaccttcccggctgtcctacagtcctcaggactctactccctcagcagcgtggtgaccgtgccctccagcagcttgggcacccagacctacatctgcaacgtgaatcacaagcccagcaacaccaaggtggacaagaaagttgagcccaaatcttgtgacaaaactcacacatgcccaccgtgcccagcacctgaagctgcagggggaccgtcagtcttcctcttccccccaaaacccaaggacaccctcatgatctcccggacccctgaggtcacatgcgtggtggtggacgtgagccacgaagaccctgaggtcaagttcaactggtacgtggacggcgtggaggtgcataatgccaagacaaagccgcgggaggagcagtacgacagcacgtaccgtgtggtcagcgtcctcaccgtcctgcaccaggactggctgaatggcaaggagtacaagtgcaaggtctccaacaaagccctcggcgcccccatcgagaaaaccatctccaaagccaaagggcagccccgagaaccacaggtgtacaccctgcccccatgccgggatgagctgaccaagaaccaggtcagcctgtggtgcctggtcaaaggcttctatcccagcgacatcgccgtggagtgggagagcaatgggcagccggagaacaactacaagaccacgcctcccgtgctggactccgacggctccttcttcctctacagcaagctcaccgtggacaagagcaggtggcagcaggggaacgtcttctcatgctccgtgatgcatgaggctctgcacaaccactacacgcagaagagcctctccctgtctccgggtaaatga

SEQ ID NO: 27 - protein, 442 aa, Artificial Sequence
  LC007 (VH-CH1)-Fc(hole) P329G LALA N297D
EVQLQESGPGLVKPSQSLSLTCSVTGYSITSGYYWNWIRQFPGNKLEWMGYITYDGSNNYNPSLKNRISITRDTSKNQFFLKLNSVTTEDTATYYCADFDYWGQGTTLTVSSASTKGPSVFPLAPSSKSTSGGTAALGCLVKDYFPEPVTVSWNSGALTSGVHTFPAVLQSSGLYSLSSVVTVPSSSLGTQTYICNVNHKPSNTKVDKKVEPKSCDKTHTCPPCPAPEAAGGPSVFLFPPKPKDTLMISRTPEVTCVVVDVSHEDPEVKFNWYVDGVEVHNAKTKPREEQYDSTYRVVSVLTVLHQDWLNGKEYKCKVSNKALGAPIEKTISKAKGQPREPQVCTLPPSRDELTKNQVSLSCAVKGFYPSDIAVEWESNGQPENNYKTTPPVLDSDGSFFLVSKLTVDKSRWQQGNVFSCSVMHEALHNHYTQKSLSLSPGK

SEQ ID NO: 28 - DNA, 1329 bp, Artificial Sequence
  LC007 (VH-CH1)-Fc(hole) P329G LALA N297D
gaggtccagctgcaggagtcaggacctggcctcgtgaaaccttctcagtctctgtctctcacctgctctgtcactggctactccatcaccagtggttattactggaactggatccggcagtttccaggaaacaagctggaatggatgggctacataacctacgacggtagcaataactacaacccatctctcaaaaatcgaatctccatcactcgtgacacatctaagaaccagtttttcctgaagttgaattctgtgactactgaggacacagctacatattactgtgcggactttgactactggggccaaggcaccactctcacagtctcctcagctagcaccaagggcccatcggtcttccccctggcaccctcctccaagagcacctctgggggcacagcggccctgggctgcctggtcaaggactacttccccgaaccggtgacggtgtcgtggaactcaggcgccctgaccagcggcgtgcacaccttcccggctgtcctacagtcctcaggactctactccctcagcagcgtggtgaccgtgccctccagcagcttgggcacccagacctacatctgcaacgtgaatcacaagcccagcaacaccaaggtggacaagaaagttgagcccaaatcttgtgacaaaactcacacatgcccaccgtgcccagcacctgaagctgcagggggaccgtcagtcttcctcttccccccaaaacccaaggacaccctcatgatctcccggacccctgaggtcacatgcgtggtggtggacgtgagccacgaagaccctgaggtcaagttcaactggtacgtggacggcgtggaggtgcataatgccaagacaaagccgcgggaggagcagtacgacagcacgtaccgtgtggtcagcgtcctcaccgtcctgcaccaggactggctgaatggcaaggagtacaagtgcaaggtctccaacaaagccctcggcgcccccatcgagaaaaccatctccaaagccaaagggcagccccgagaaccacaggtgtgcaccctgcccccatcccgggatgagctgaccaagaaccaggtcagcctctcgtgcgcagtcaaaggcttctatcccagcgacatcgccgtggagtgggagagcaatgggcagccggagaacaactacaagaccacgcctcccgtgctggactccgacggctccttcttcctcgtgagcaagctcaccgtggacaagagcaggtggcagcaggggaacgtcttctcatgctccgtgatgcatgaggctctgcacaaccactacacgcagaagagcctctccctgtctccgggtaaatga

SEQ ID NO: 29 - protein, 664 aa, Artificial Sequence
  V9 (VL-CH1)-LC007 (VH-CH1)-Fc(hole) P329G LALA
DIQMTQSPSSLSASVGDRVTITCRASQDIRNYLNWYQQKPGKAPKLLIYYTSRLESGVPSRFSGSGSGTDYTLTISSLQPEDFATYYCQQGNTLPWTFGQGTKVEIKSSASTKGPSVFPLAPSSKSTSGGTAALGCLVKDYFPEPVTVSWNSGALTSGVHTFPAVLQSSGLYSLSSVVTVPSSSLGTQTYICNVNHKPSNTKVDKKVEPKSCGGGGSGGGGSEVQLQESGPGLVKPSQSLSLTCSVTGYSITSGYYWNWIRQFPGNKLEWMGYITYDGSNNYNPSLKNRISITRDTSKNQFFLKLNSVTTEDTATYYCADFDYWGQGTTLTVSSASTKGPSVFPLAPSSKSTSGGTAALGCLVKDYFPEPVTVSWNSGALTSGVHTFPAVLQSSGLYSLSSVVTVPSSSLGTQTYICNVNHKPSNTKVDKKVEPKSCDKTHTCPPCPAPEAAGGPSVFLFPPKPKDTLMISRTPEVTCVVVDVSHEDPEVKFNWYVDGVEVHNAKTKPREEQYNSTYRVVSVLTVLHQDWLNGKEYKCKVSNKALGAPIEKTISKAKGQPREPQVCTLPPSRDELTKNQVSLSCAVKGFYPSDIAVEWESNGQPENNYKTTPPVLDSDGSFFLVSKLTVDKSRWQQGNVFSCSVMHEALHNHYTQKSLSLSPGK

SEQ ID NO: 30 - DNA, 1995 bp, Artificial Sequence
  V9 (VL-CH1)-LC007 (VH-CH1)-Fc(hole) P329G LALA
gatatccagatgacccagagccccagctctctgagcgccagcgtgggcgacagagtgaccatcacctgtcgggccagccaggacatcagaaactacctgaactggtatcagcagaagcccggcaaggcccccaagctgctgatctactacaccagcagactggaaagcggcgtgccctccagattttccggcagcggctccggcaccgactacaccctgaccatcagcagcctgcagcccgaggatttcgccacatattactgccagcagggcaataccctgccctggaccttcggacagggcacaaaagtggaaatcaagagcagcgcttccaccaaaggcccttccgtgtttcctctggctcctagctccaagtccacctctggaggcaccgctgctctcggatgcctcgtgaaggattattttcctgagcctgtgacagtgtcctggaatagcggagcactgacctctggagtgcatactttccccgctgtgctgcagtcctctggactgtacagcctgagcagcgtggtgacagtgcccagcagcagcctgggcacccagacctacatctgcaacgtgaaccacaagcccagcaacaccaaggtggacaagaaggtggaacccaagtcttgtggcggaggcggatccggcggagggggatctgaggtgcagctgcaggaaagcggccctggcctggtgaaacccagccagagcctgagcctgacctgcagcgtgaccggctacagcatcaccagcggctactactggaactggatcagacagttccccggcaacaagctggaatggatgggctacatcacctacgacggcagcaacaactacaaccccagcctgaagaacagaatcagcatcacccgggacaccagcaagaaccagttcttcctgaagctgaacagcgtgaccaccgaggacaccgccacctactactgcgccgacttcgactactggggccagggcaccaccctgaccgtgtcctccgcctctaccaagggccccagcgtgttccccctggcacccagcagcaagagcacatctggcggaacagccgctctgggctgtctggtgaaagactacttccccgagcccgtgaccgtgtcttggaactctggcgccctgaccagcggcgtgcacacctttccagccgtgctgcagagcagcggcctgtactccctgtcctccgtggtcaccgtgccctctagctccctgggaacacagacatatatctgtaatgtcaatcacaagccttccaacaccaaagtcgataagaaagtcgagcccaagagctgcgacaaaactcacacatgcccaccgtgcccagcacctgaagctgcagggggaccgtcagtcttcctcttccccccaaaacccaaggacaccctcatgatctcccggacccctgaggtcacatgcgtggtggtggacgtgagccacgaagaccctgaggtcaagttcaactggtacgtggacggcgtggaggtgcataatgccaagacaaagccgcgggaggagcagtacaacagcacgtaccgtgtggtcagcgtcctcaccgtcctgcaccaggactggctgaatggcaaggagtacaagtgcaaggtctccaacaaagccctcggcgcccccatcgagaaaaccatctccaaagccaaagggcagccccgagaaccacaggtgtgcaccctgcccccatcccgggatgagctgaccaagaaccaggtcagcctctcgtgcgcagtcaaaggcttctatcccagcgacatcgccgtggagtgggagagcaatgggcagccggagaacaactacaagaccacgcctcccgtgctggactccgacggctccttcttcctcgtgagcaagctcaccgtggacaagagcaggtggcagcaggggaacgtcttctcatgctccgtgatgcatgaggctctgcacaaccactacacgcagaagagcctctccctgtctccgggtaaatga

SEQ ID NO: 31 - protein, 229 aa, Artificial Sequence
  Fc(knob) wt
DKTHTCPPCPAPELLGGPSVFLFPPKPKDTLMISRTPEVTCVVVDVSHEDPEVKFNWYVDGVEVHNAKTKPREEQYNSTYRVVSVLTVLHQDWLNGKEYKCKVSNKALPAPIEKTISKAKGQPREPQVYTLPPCRDELTKNQVSLWCLVKGFYPSDIAVEWESNGQPENNYKTTPPVLDSDGSFFLYSKLTVDKSRWQQGNVFSCSVMHEALHNHYTQKSLSLSPGKSG

SEQ ID NO: 32 - DNA, 690 bp, Artificial Sequence
  Fc(knob) wt
gacaaaactcacacatgcccaccgtgcccagcacctgaactcctggggggaccgtcagtcttcctcttccccccaaaacccaaggacaccctcatgatctcccggacccctgaggtcacatgcgtggtggtggacgtgagccacgaagaccctgaggtcaagttcaactggtacgtggacggcgtggaggtgcataatgccaagacaaagccgcgggaggagcagtacaacagcacgtaccgtgtggtcagcgtcctcaccgtcctgcaccaggactggctgaatggcaaggagtacaagtgcaaggtctccaacaaagccctcccagcccccatcgagaaaaccatctccaaagccaaagggcagccccgagaaccacaggtgtacaccctgcccccatgccgggatgagctgaccaagaaccaggtcagcctgtggtgcctggtcaaaggcttctatcccagcgacatcgccgtggagtgggagagcaatgggcagccggagaacaactacaagaccacgcctcccgtgctggactccgacggctccttcttcctctacagcaagctcaccgtggacaagagcaggtggcagcaggggaacgtcttctcatgctccgtgatgcatgaggctctgcacaaccactacacgcagaagagcctctccctgtctccgggtaaatccggatga

SEQ ID NO: 33 - protein, 229 aa, Artificial Sequence
  V9 (VH-CL)
EVQLVESGGGLVQPGGSLRLSCAASGYSFTGYTMNWVRQAPGKGLEWVALINPYKGVSTYNQKFKDRFTISVDKSKNTAYLQMNSLRAEDTAVYYCARSGYYGDSDWYFDVWGQGTLVTVSSASVAAPSVFIFPPSDEQLKSGTASVVCLLNNFYPREAKVQWKVDNALQSGNSQESVTEQDSKDSTYSLSSTLTLSKADYEKHKVYACEVTHQGLSSPVTKSFNRGEC

SEQ ID NO: 34 - DNA, 690 bp, Artificial Sequence
  V9 (VH-CL)
gaggtgcagctggtcgagagcggaggcggcctggtgcagcctggcggcagcctgagactgagctgcgccgccagcggctacagcttcaccggctacaccatgaactgggtccggcaggcacctggcaagggactggaatgggtggccctgatcaacccctacaagggcgtgagcacctacaaccagaagttcaaggaccggttcaccatcagcgtggacaagagcaagaacaccgcctatctgcagatgaacagcctgcgggccgaggacaccgccgtgtactactgcgccagaagcggctactacggcgacagcgactggtacttcgacgtgtggggccagggcaccctcgtgaccgtgtctagcgctagcgtggctgcaccatctgtcttcatcttcccgccatctgatgagcagttgaaatctggaactgcctctgttgtgtgcctgctgaataacttctatcccagagaggccaaagtacagtggaaggtggataacgccctccaatcgggtaactcccaggagagtgtcacagagcaggacagcaaggacagcacctacagcctcagcagcaccctgacgctgagcaaagcagactacgagaaacacaaagtctacgcctgcgaagtcacccatcagggcctgagctcgcccgtcacaaagagcttcaacaggggagagtgttga

SEQ ID NO: 35 - protein, 670 aa, Artificial Sequence
  FN18 (VL-CH1)-LC007 (VH-CH1)-Fc(hole) P329G LALA
DIVMSQSPSSLAVSVGEKVTMSCKSSQSLLYSSNQKNYLAWYQQKPGQSPKLLINWASTRESGVPDRFTGSGSRTDFTLTISSVKAEDLAVYFCQQFYSYPPTFGGGTKLEIKSSASTKGPSVFPLAPSSKSTSGGTAALGCLVKDYFPEPVTVSWNSGALTSGVHTFPAVLQSSGLYSLSSVVTVPSSSLGTQTYICNVNHKPSNTKVDKKVEPKSCGGGGSGGGGSEVQLQESGPGLVKPSQSLSLTCSVTGYSITSGYYWNWIRQFPGNKLEWMGYITYDGSNNYNPSLKNRISITRDTSKNQFFLKLNSVTTEDTATYYCADFDYWGQGTTLTVSSASTKGPSVFPLAPSSKSTSGGTAALGCLVKDYFPEPVTVSWNSGALTSGVHTFPAVLQSSGLYSLSSVVTVPSSSLGTQTYICNVNHKPSNTKVDKKVEPKSCDKTHTCPPCPAPEAAGGPSVFLFPPKPKDTLMISRTPEVTCVVVDVSHEDPEVKFNWYVDGVEVHNAKTKPREEQYNSTYRVVSVLTVLHQDWLNGKEYKCKVSNKALGAPIEKTISKAKGQPREPQVCTLPPSRDELTKNQVSLSCAVKGFYPSDIAVEWESNGQPENNYKTTPPVLDSDGSFFLVSKLTVDKSRWQQGNVFSCSVMHEALHNHYTQKSLSLSPGK

SEQ ID NO: 36 - DNA, 2013 bp, Artificial Sequence
  FN18 (VL-CH1)-LC007 (VH-CH1)-Fc(hole) P329G LALA
gacatcgtgatgagccagagccccagcagcctggccgtgtccgtgggcgagaaagtgaccatgagctgcaagagcagccagagcctgctgtactcctctaaccagaagaactacctggcctggtatcagcagaagcccggccagtcccccaagctgctgatcaactgggccagcacccgcgagagcggcgtgcccgatagattcacaggcagcggcagccggaccgacttcaccctgaccatcagcagcgtgaaggccgaggatctggccgtgtacttctgccagcagttctacagctacccccccaccttcggcggaggcacgaagctggaaatcaagagcagcgcttccaccaaaggcccttccgtgtttcctctggctcctagctccaagtccacctctggaggcaccgctgctctcggatgcctcgtgaaggattattttcctgagcctgtgacagtgtcctggaatagcggagcactgacctctggagtgcatactttccccgctgtgctgcagtcctctggactgtacagcctgagcagcgtggtgacagtgcccagcagcagcctgggcacccagacctacatctgcaacgtgaaccacaagcccagcaacaccaaggtggacaagaaggtggaacccaagtcttgtggcggaggcggatccggcggagggggatctgaggtgcagctgcaggaaagcggccctggcctggtgaaacccagccagagcctgagcctgacctgcagcgtgaccggctacagcatcaccagcggctactactggaactggatcagacagttccccggcaacaagctggaatggatgggctacatcacctacgacggcagcaacaactacaaccccagcctgaagaacagaatcagcatcacccgggacaccagcaagaaccagttcttcctgaagctgaacagcgtgaccaccgaggacaccgccacctactactgcgccgacttcgactactggggccagggcaccaccctgaccgtgtcctccgcctctaccaagggccccagcgtgttccccctggcacccagcagcaagagcacatctggcggaacagccgctctgggctgtctggtgaaagactacttccccgagcccgtgaccgtgtcttggaactctggcgccctgaccagcggcgtgcacacctttccagccgtgctgcagagcagcggcctgtactccctgtcctccgtggtcaccgtgccctctagctccctgggaacacagacatatatctgtaatgtcaatcacaagccttccaacaccaaagtcgataagaaagtcgagcccaagagctgcgacaaaactcacacatgcccaccgtgcccagcacctgaagctgcagggggaccgtcagtcttcctcttccccccaaaacccaaggacaccctcatgatctcccggacccctgaggtcacatgcgtggtggtggacgtgagccacgaagaccctgaggtcaagttcaactggtacgtggacggcgtggaggtgcataatgccaagacaaagccgcgggaggagcagtacaacagcacgtaccgtgtggtcagcgtcctcaccgtcctgcaccaggactggctgaatggcaaggagtacaagtgcaaggtctccaacaaagccctcggcgcccccatcgagaaaaccatctccaaagccaaagggcagccccgagaaccacaggtgtgcaccctgcccccatcccgggatgagctgaccaagaaccaggtcagcctctcgtgcgcagtcaaaggcttctatcccagcgacatcgccgtggagtgggagagcaatgggcagccggagaacaactacaagaccacgcctcccgtgctggactccgacggctccttcttcctcgtgagcaagctcaccgtggacaagagcaggtggcagcaggggaacgtcttctcatgctccgtgatgcatgaggctctgcacaaccactacacgcagaagagcctctccctgtctccgggtaaatga

SEQ ID NO: 37 - protein, 231 aa, Artificial Sequence
  FN18 (VH-CL)
QVQLQQSEAELARPGASVKMSCKASGYTFTDYTIHWLKQRPGQGLDWIGYFNPSSESTEYNRKFKDRTILTADRSSTTAYMQLSSLTSEDSAVYYCSRKGEKLLGNRYWYFDVWGAGTSVTVSSASVAAPSVFIFPPSDEQLKSGTASVVCLLNNFYPREAKVQWKVDNALQSGNSQESVTEQDSKDSTYSLSSTLTLSKADYEKHKVYACEVTHQGLSSPVTKSFNRGEC

SEQ ID NO: 38 - DNA, 696 bp, Artificial Sequence
  FN18 (VH-CL)
caggtgcagctgcagcagagcgaggccgagctggctagacctggagccagcgtgaagatgagctgcaaggccagcggctacaccttcaccgactacaccatccactggctgaagcagcggcctggacagggcctggactggatcggctacttcaaccccagcagcgagagcaccgagtacaaccggaagttcaaggaccggaccatcctgaccgccgacagaagcagcaccaccgcctacatgcagctgagcagcctgaccagcgaggacagcgccgtgtactactgcagccggaagggcgagaagctgctgggcaacagatactggtacttcgacgtgtggggagccggcaccagcgtgaccgtgtctagcgctagcgtggctgcaccatctgtcttcatcttcccgccatctgatgagcagttgaaatctggaactgcctctgttgtgtgcctgctgaataacttctatcccagagaggccaaagtacagtggaaggtggataacgccctccaatcgggtaactcccaggagagtgtcacagagcaggacagcaaggacagcacctacagcctcagcagcaccctgacgctgagcaaagcagactacgagaaacacaaagtctacgcctgcgaagtcacccatcagggcctgagctcgcccgtcacaaagagcttcaacaggggagagtgttga

SEQ ID NO: 39 - protein, 664 aa, Artificial Sequence
  2C11 (VL-CH1)-LC007 (VH-CH1)-Fc(hole) P329G LALA
DIQMTQSPSSLPASLGDRVTINCQASQDISNYLNWYQQKPGKAPKLLIYYTNKLADGVPSRFSGSGSGRDSSFTISSLESEDIGSYYCQQYYNYPWTFGPGTKLEIKSSASTKGPSVFPLAPSSKSTSGGTAALGCLVKDYFPEPVTVSWNSGALTSGVHTFPAVLQSSGLYSLSSVVTVPSSSLGTQTYICNVNHKPSNTKVDKKVEPKSCGGGGSGGGGSEVQLQESGPGLVKPSQSLSLTCSVTGYSITSGYYWNWIRQFPGNKLEWMGYITYDGSNNYNPSLKNRISITRDTSKNQFFLKLNSVTTEDTATYYCADFDYWGQGTTLTVSSASTKGPSVFPLAPSSKSTSGGTAALGCLVKDYFPEPVTVSWNSGALTSGVHTFPAVLQSSGLYSLSSVVTVPSSSLGTQTYICNVNHKPSNTKVDKKVEPKSCDKTHTCPPCPAPEAAGGPSVFLFPPKPKDTLMISRTPEVTCVVVDVSHEDPEVKFNWYVDGVEVHNAKTKPREEQYNSTYRVVSVLTVLHQDWLNGKEYKCKVSNKALGAPIEKTISKAKGQPREPQVCTLPPSRDELTKNQVSLSCAVKGFYPSDIAVEWESNGQPENNYKTTPPVLDSDGSFFLVSKLTVDKSRWQQGNVFSCSVMHEALHNHYTQKSLSLSPGK

SEQ ID NO: 40 - DNA, 1995 bp, Artificial Sequence
  2C11 (VL-CH1)-LC007 (VH-CH1)-Fc(hole) P329G LALA
gacatccagatgacccagagccccagcagcctgcctgccagcctgggcgacagagtgaccatcaactgccaggccagccaggacatcagcaactacctgaactggtatcagcagaagcctggcaaggcccccaagctgctgatctactacaccaacaagctggccgacggcgtgcccagcagattcagcggcagcggctccggcagagacagcagcttcaccatctccagcctggaaagcgaggacatcggcagctactactgccagcagtactacaactacccctggaccttcggccctggcaccaagctggaaatcaagagcagcgcttccaccaaaggcccttccgtgtttcctctggctcctagctccaagtccacctctggaggcaccgctgctctcggatgcctcgtgaaggattattttcctgagcctgtgacagtgtcctggaatagcggagcactgacctctggagtgcatactttccccgctgtgctgcagtcctctggactgtacagcctgagcagcgtggtgacagtgcccagcagcagcctgggcacccagacctacatctgcaacgtgaaccacaagcccagcaacaccaaggtggacaagaaggtggaacccaagtcttgtggcggaggcggatccggcggagggggatctgaggtgcagctgcaggaaagcggccctggcctggtgaaacccagccagagcctgagcctgacctgcagcgtgaccggctacagcatcaccagcggctactactggaactggatcagacagttccccggcaacaagctggaatggatgggctacatcacctacgacggcagcaacaactacaaccccagcctgaagaacagaatcagcatcacccgggacaccagcaagaaccagttcttcctgaagctgaacagcgtgaccaccgaggacaccgccacctactactgcgccgacttcgactactggggccagggcaccaccctgaccgtgtcctccgcctctaccaagggccccagcgtgttccccctggcacccagcagcaagagcacatctggcggaacagccgctctgggctgtctggtgaaagactacttccccgagcccgtgaccgtgtcttggaactctggcgccctgaccagcggcgtgcacacctttccagccgtgctgcagagcagcggcctgtactccctgtcctccgtggtcaccgtgccctctagctccctgggaacacagacatatatctgtaatgtcaatcacaagccttccaacaccaaagtcgataagaaagtcgagcccaagagctgcgacaaaactcacacatgcccaccgtgcccagcacctgaagctgcagggggaccgtcagtcttcctcttccccccaaaacccaaggacaccctcatgatctcccggacccctgaggtcacatgcgtggtggtggacgtgagccacgaagaccctgaggtcaagttcaactggtacgtggacggcgtggaggtgcataatgccaagacaaagccgcgggaggagcagtacaacagcacgtaccgtgtggtcagcgtcctcaccgtcctgcaccaggactggctgaatggcaaggagtacaagtgcaaggtctccaacaaagccctcggcgcccccatcgagaaaaccatctccaaagccaaagggcagccccgagaaccacaggtgtgcaccctgcccccatcccgggatgagctgaccaagaaccaggtcagcctctcgtgcgcagtcaaaggcttctatcccagcgacatcgccgtggagtgggagagcaatgggcagccggagaacaactacaagaccacgcctcccgtgctggactccgacggctccttcttcctcgtgagcaagctcaccgtggacaagagcaggtggcagcaggggaacgtcttctcatgctccgtgatgcatgaggctctgcacaaccactacacgcagaagagcctctccctgtctccgggtaaatga

SEQ ID NO: 41 - protein, 223 aa, Artificial Sequence
  2C11 (VH-CL)
EVQLVESGGGLVQPGKSLKLSCEASGFTFSGYGMHWVRQAPGRGLESVAYITSSSINIKYADAVKGRFTVSRDNAKNLLFLQMNILKSEDTAMYYCARFDWDKNYWGQGTMVTVSSASVAAPSVFIFPPSDEQLKSGTASVVCLLNNFYPREAKVQWKVDNALQSGNSQESVTEQDSKDSTYSLSSTLTLSKADYEKHKVYACEVTHQGLSSPVTKSFNRGEC

SEQ ID NO: 42 - DNA, 672 bp, Artificial Sequence
  2C11 (VH-CL)
gaggtgcagctggtggaaagcggcggaggcctggtgcagcccggcaagagcctgaagctgagctgcgaggccagcggcttcaccttcagcggctacggcatgcactgggtgagacaggcccctggcagaggactggaaagcgtggcctacatcaccagcagcagcatcaacattaagtacgccgacgccgtgaagggccggttcaccgtgtccagggataacgccaagaacctgctgttcctgcagatgaacatcctgaagtccgaggacaccgctatgtattactgcgccagattcgactgggacaagaactactggggccagggcaccatggtcacagtgtctagcgctagcgtggctgcaccatctgtcttcatcttcccgccatctgatgagcagttgaaatctggaactgcctctgttgtgtgcctgctgaataacttctatcccagagaggccaaagtacagtggaaggtggataacgccctccaatcgggtaactcccaggagagtgtcacagagcaggacagcaaggacagcacctacagcctcagcagcaccctgacgctgagcaaagcagactacgagaaacacaaagtctacgcctgcgaagtcacccatcagggcctgagctcgcccgtcacaaagagcttcaacaggggagagtgttga

SEQ ID NO: 43 - protein, 700 aa, Artificial Sequence
  V9 (scFab)-Fc(knob) P329G LALA
DIQMTQSPSSLSASVGDRVTITCRASQDIRNYLNWYQQKPGKAPKLLIYYTSRLESGVPSRFSGSGSGTDYTLTISSLQPEDFATYYCQQGNTLPWTFGQGTKVEIKRTVAAPSVFIFPPSDEQLKSGTASVVCLLNNFYPREAKVQWKVDNALQSGNSQESVTEQDSKDSTYSLSSTLTLSKADYEKHKVYACEVTHQGLSSPVTKSFNRGECSGGGSGGGSEGGGSEGGGSEGGGSEGGGSGGGSGEVQLVESGGGLVQPGGSLRLSCAASGYSFTGYTMNWVRQAPGKGLEWVALINPYKGVSTYNQKFKDRFTISVDKSKNTAYLQMNSLRAEDTAVYYCARSGYYGDSDWYFDVWGQGTLVTVSSASTKGPSVFPLAPSSKSTSGGTAALGCLVKDYFPEPVTVSWNSGALTSGVHTFPAVLQSSGLYSLSSVVTVPSSSLGTQTYICNVNHKPSNTKVDKKVEPKSCDKTHTCPPCPAPEAAGGPSVFLFPPKPKDTLMISRTPEVTCVVVDVSHEDPEVKFNWYVDGVEVHNAKTKPREEQYNSTYRVVSVLTVLHQDWLNGKEYKCKVSNKALGAPIEKTISKAKGQPREPQVYTLPPCRDELTKNQVSLWCLVKGFYPSDIAVEWESNGQPENNYKTTPPVLDSDGSFFLYSKLTVDKSRWQQGNVFSCSVMHEALHNHYTQKSLSLSPGK

SEQ ID NO: 44 - DNA, 2103 bp, Artificial Sequence
  V9 (scFab)-Fc(knob) P329G LALA
gacatccagatgacccagagcccctctagcctgagcgccagcgtgggcgacagagtgaccatcacctgtcgggccagccaggacatcagaaactacctgaactggtatcagcagaagcccggcaaggcccccaagctgctgatctactacacctctagactggaaagcggcgtgcccagccggtttagcggcagcggctccggcaccgactacaccctgaccatcagcagcctgcagcccgaggacttcgccacctactactgccagcagggcaacacactcccctggaccttcggccagggcaccaaggtggagatcaagcgtacggtggccgctcccagcgtgttcatcttcccccccagcgacgagcagctgaagtccggcaccgccagcgtcgtgtgcctgctgaacaacttctacccccgggaggccaaggtgcagtggaaggtggacaacgccctgcagagcggcaacagccaggaaagcgtcaccgagcaggacagcaaggactccacctacagcctgagcagcaccctgaccctgagcaaggccgactacgagaagcacaaggtgtacgcctgcgaagtgacccaccagggcctgtccagccccgtgaccaagagcttcaaccggggcgagtgcagcggcggaggctctggaggcggctctgaaggcggaggaagtgagggcggaggctcagaaggcggcggaagcgaaggtggcggctctggcggcggatccggcgaggtgcagctggtcgagtccggcggaggcctggtgcagcctggcggcagcctgagactgagctgcgccgccagcggctacagcttcaccggctacaccatgaactgggtccggcaggctcctggcaagggcctcgaatgggtggccctgatcaacccctacaagggcgtgagcacctacaaccagaagttcaaggaccggttcaccatcagcgtggacaagagcaagaacaccgcctatctgcagatgaacagcctgcgggccgaggacaccgccgtgtactactgcgccagaagcggctactacggcgacagcgactggtacttcgacgtgtggggccagggcacactggtcaccgtgtccagcgctagcaccaagggccctagcgtgttccctctggcccctagcagcaagagcacaagtggaggaacagccgccctgggctgcctggtcaaggactacttccccgagcccgtgaccgtgtcctggaattctggcgccctgacaagcggcgtgcacacatttccagccgtgctgcagagcagcggcctgtactctctgagcagcgtcgtgaccgtgccctctagctctctgggcacccagacctacatctgcaacgtgaaccacaagcccagcaacaccaaagtggacaagaaggtggaacccaagagctgcgacaagacccacacctgtcccccttgccctgcccctgaagctgctggtggcccttccgtgttcctgttccccccaaagcccaaggacaccctgatgatcagccggacccccgaagtgacctgcgtggtggtcgatgtgtcccacgaggaccctgaagtgaagttcaattggtacgtggacggcgtggaagtgcacaatgccaagaccaagccgcgggaggagcagtacaacagcacgtaccgtgtggtcagcgtcctcaccgtcctgcaccaggactggctgaatggcaaggagtacaagtgcaaggtctccaacaaagccctcggcgcccccatcgagaaaaccatctccaaagccaaagggcagccccgagaaccacaggtgtacaccctgcccccatgccgggatgagctgaccaagaaccaggtcagcctgtggtgcctggtcaaaggcttctatcccagcgacatcgccgtggagtgggagagcaatgggcagccggagaacaactacaagaccacgcctcccgtgctggactccgacggctccttcttcctctacagcaagctcaccgtggacaagagcaggtggcagcaggggaacgtcttctcatgctccgtgatgcatgaggctctgcacaaccactacacgcagaagagcctctccctgtctccgggtaaataa

SEQ ID NO: 45 - protein, 450 aa, Artificial Sequence
  GA201 (VH-CH1)-Fc(hole) P329G LALA
QVQLVQSGAEVKKPGSSVKVSCKASGFTFTDYKIHWVRQAPGQGLEWMGYFNPNSGYSTYAQKFQGRVTITADKSTSTAYMELSSLRSEDTAVYYCARLSPGGYYVMDAWGQGTTVTVSSASTKGPSVFPLAPSSKSTSGGTAALGCLVKDYFPEPVTVSWNSGALTSGVHTFPAVLQSSGLYSLSSVVTVPSSSLGTQTYICNVNHKPSNTKVDKKVEPKSCDKTHTCPPCPAPEAAGGPSVFLFPPKPKDTLMISRTPEVTCVVVDVSHEDPEVKFNWYVDGVEVHNAKTKPREEQYNSTYRVVSVLTVLHQDWLNGKEYKCKVSNKALGAPIEKTISKAKGQPREPQVCTLPPSRDELTKNQVSLSCAVKGFYPSDIAVEWESNGQPENNYKTTPPVLDSDGSFFLVSKLTVDKSRWQQGNVFSCSVMHEALHNHYTQKSLSLSPGK

SEQ ID NO: 46 - DNA, 1353 bp, Artificial Sequence
  GA201 (VH-CH1)-Fc(hole) P329G LALA
caggtgcagctggtgcagtctggggctgaggtgaagaagcctgggtcctcggtgaaggtctcctgcaaggcctctggtttcacattcactgactacaagatacactgggtgcgacaggcccctggacaagggctcgagtggatgggatatttcaaccctaacagcggttatagtacctacgcacagaagttccagggcagggtcaccattaccgcggacaaatccacgagcacagcctacatggagctgagcagcctgagatctgaggacacggccgtgtattactgtgcgagactatccccaggcggttactatgttatggatgcctggggccaagggaccaccgtgaccgtctcctcagctagcaccaagggcccatcggtcttccccctggcaccctcctccaagagcacctctgggggcacagcggccctgggctgcctggtcaaggactacttccccgaaccggtgacggtgtcgtggaactcaggcgccctgaccagcggcgtgcacaccttcccggctgtcctacagtcctcaggactctactccctcagcagcgtggtgaccgtgccctccagcagcttgggcacccagacctacatctgcaacgtgaatcacaagcccagcaacaccaaggtggacaagaaagttgagcccaaatcttgtgacaaaactcacacatgcccaccgtgcccagcacctgaagctgcagggggaccgtcagtcttcctcttccccccaaaacccaaggacaccctcatgatctcccggacccctgaggtcacatgcgtggtggtggacgtgagccacgaagaccctgaggtcaagttcaactggtacgtggacggcgtggaggtgcataatgccaagacaaagccgcgggaggagcagtacaacagcacgtaccgtgtggtcagcgtcctcaccgtcctgcaccaggactggctgaatggcaaggagtacaagtgcaaggtctccaacaaagccctcggcgcccccatcgagaaaaccatctccaaagccaaagggcagccccgagaaccacaggtgtgcaccctgcccccatcccgggatgagctgaccaagaaccaggtcagcctctcgtgcgcagtcaaaggcttctatcccagcgacatcgccgtggagtgggagagcaatgggcagccggagaacaactacaagaccacgcctcccgtgctggactccgacggctccttcttcctcgtgagcaagctcaccgtggacaagagcaggtggcagcaggggaacgtcttctcatgctccgtgatgcatgaggctctgcacaaccactacacgcagaagagcctctccctgtctccgggtaaatga

SEQ ID NO: 47 - protein, 213 aa, Artificial Sequence
  GA201 (VL-CL)
DIQMTQSPSSLSASVGDRVTITCRASQGINNYLNWYQQKPGKAPKRLIYNTNNLQTGVPSRFSGSGSGTEFTLTISSLQPEDFATYYCLQHNSFPTFGQGTKLEIKRTVAAPSVFIFPPSDEQLKSGTASVVCLLNNFYPREAKVQWKVDNALQSGNSQESVTEQDSKDSTYSLSSTLTLSKADYEKHKVYACEVTHQGLSSPVTKSFNRGEC

SEQ ID NO: 48 - DNA, 642 bp, Artificial Sequence
  GA201 (VL-CL)
gatatccagatgacccagtctccatcctccctgtctgcatctgtcggagaccgggtcaccatcacctgccgggcaagtcagggcattaacaattacttaaattggtaccagcagaagccagggaaagcccctaagcgcctgatctataataccaacaacttgcagacaggcgtcccatcaaggttcagcggcagtggatccgggacagaattcactctcaccatcagcagcctgcagcctgaagattttgccacctattactgcttgcagcataatagttttcccacgtttggccagggcaccaagctcgagatcaagcgtacggtggctgcaccatctgtcttcatcttcccgccatctgatgagcagttgaaatctggaactgcctctgttgtgtgcctgctgaataacttctatcccagagaggccaaagtacagtggaaggtggataacgccctccaatcgggtaactcccaggagagtgtcacagagcaggacagcaaggacagcacctacagcctcagcagcaccctgacgctgagcaaagcagactacgagaaacacaaagtctacgcctgcgaagtcacccatcagggcctgagctcgcccgtcacaaagagcttcaacaggggagagtgttag

SEQ ID NO: 49 - protein, 697 aa, Artificial Sequence
  GA201 (scFab)-Fc(knob) P329G LALA
DIQMTQSPSSLSASVGDRVTITCRASQGINNYLNWYQQKPGKAPKRLIYNTNNLQTGVPSRFSGSGSGTEFTLTISSLQPEDFATYYCLQHNSFPTFGQGTKLEIKRTVAAPSVFIFPPSDEQLKSGTASVVCLLNNFYPREAKVQWKVDNALQSGNSQESVTEQDSKDSTYSLSSTLTLSKADYEKHKVYACEVTHQGLSSPVTKSFNRGECSGGGSGGGSEGGGSEGGGSEGGGSEGGGSGGGSGQVQLVQSGAEVKKPGSSVKVSCKASGFTFTDYKIHWVRQAPGQGLEWMGYFNPNSGYSTYAQKFQGRVTITADKSTSTAYMELSSLRSEDTAVYYCARLSPGGYYVMDAWGQGTTVTVSSASTKGPSVFPLAPSSKSTSGGTAALGCLVKDYFPEPVTVSWNSGALTSGVHTFPAVLQSSGLYSLSSVVTVPSSSLGTQTYICNVNHKPSNTKVDKKVEPKSCDKTHTCPPCPAPEAAGGPSVFLFPPKPKDTLMISRTPEVTCVVVDVSHEDPEVKFNWYVDGVEVHNAKTKPREEQYNSTYRVVSVLTVLHQDWLNGKEYKCKVSNKALGAPIEKTISKAKGQPREPQVYTLPPCRDELTKNQVSLWCLVKGFYPSDIAVEWESNGQPENNYKTTPPVLDSDGSFFLYSKLTVDKSRWQQGNVFSCSVMHEALHNHYTQKSLSLSPGK

SEQ ID NO: 50 - DNA, 2094 bp, Artificial Sequence
  GA201 (scFab)-Fc(knob) P329G LALA
gatatccagatgacccagtctccatcctccctgtctgcatctgtcggagaccgggtcaccatcacctgccgggcaagtcagggcattaacaattacttaaattggtaccagcagaagccagggaaagcccctaagcgcctgatctataataccaacaacttgcagacaggcgtcccatcaaggttcagcggcagtggatccgggacagaattcactctcaccatcagcagcctgcagcctgaagattttgccacctattactgcttgcagcataatagttttcccacgtttggccagggcaccaagctcgagatcaagcgtacggtggccgctcccagcgtgttcatcttcccccccagcgacgagcagctgaaatctggcaccgccagcgtcgtgtgcctgctgaacaacttctacccccgggaggccaaggtgcagtggaaggtggacaacgccctgcagagcggcaacagccaggaaagcgtcaccgagcaggacagcaaggactccacctatagcctgtccagcaccctgaccctgagcaaggccgactacgagaagcacaaggtgtacgcctgcgaagtgacccaccagggcctgagcagccccgtgaccaagagcttcaaccggggcgagtgcagcggcggaggtagcggaggcggctctgagggcggaggaagcgagggcggaggctccgaaggcggcggaagcgaaggtggcggctctggcggcggatccggccaggtgcagctggtgcagtctggggctgaggtgaagaagcctgggtcctcggtgaaggtctcctgcaaggcctctggtttcacattcactgactacaagatacactgggtgcgacaggcccctggacaagggctcgagtggatgggatatttcaaccctaacagcggttatagtacctacgcacagaagttccagggcagggtcaccattaccgcggacaaatccacgagcacagcctacatggagctgagcagcctgagatctgaggacacggccgtgtattactgtgcgagactatccccaggcggttactatgttatggatgcctggggccaagggaccaccgtgaccgtctcctcagctagcaccaagggccctagcgtgttccctctggcccctagcagcaagagcacaagtggaggaacagccgccctgggctgcctggtcaaggactacttccccgagcccgtgaccgtgtcctggaattctggcgccctgacaagcggcgtgcacacatttccagccgtgctgcagagcagcggcctgtactctctgagcagcgtcgtgaccgtgccctctagctctctgggcacccagacctacatctgcaacgtgaaccacaagcccagcaacaccaaagtggacaagaaggtggaacccaagagctgcgacaagacccacacctgtcccccttgccctgcccctgaagctgctggtggcccttccgtgttcctgttccccccaaagcccaaggacaccctgatgatcagccggacccccgaagtgacctgcgtggtggtcgatgtgtcccacgaggaccctgaagtgaagttcaattggtacgtggacggcgtggaagtgcacaatgccaagaccaagccgcgggaggagcagtacaacagcacgtaccgtgtggtcagcgtcctcaccgtcctgcaccaggactggctgaatggcaaggagtacaagtgcaaggtctccaacaaagccctcggcgcccccatcgagaaaaccatctccaaagccaaagggcagccccgagaaccacaggtgtacaccctgcccccatgccgggatgagctgaccaagaaccaggtcagcctgtggtgcctggtcaaaggcttctatcccagcgacatcgccgtggagtgggagagcaatgggcagccggagaacaactacaagaccacgcctcccgtgctggactccgacggctccttcttcctctacagcaagctcaccgtggacaagagcaggtggcagcaggggaacgtcttctcatgctccgtgatgcatgaggctctgcacaaccactacacgcagaagagcctctccctgtctccgggtaaataa

SEQ ID NO: 51 - protein, 452 aa, Artificial Sequence
  V9 (VH-CH1)-Fc(hole) P329G LALA
EVQLVESGGGLVQPGGSLRLSCAASGYSFTGYTMNWVRQAPGKGLEWVALINPYKGVSTYNQKFKDRFTISVDKSKNTAYLQMNSLRAEDTAVYYCARSGYYGDSDWYFDVWGQGTLVTVSSASTKGPSVFPLAPSSKSTSGGTAALGCLVKDYFPEPVTVSWNSGALTSGVHTFPAVLQSSGLYSLSSVVTVPSSSLGTQTYICNVNHKPSNTKVDKKVEPKSCDKTHTCPPCPAPEAAGGPSVFLFPPKPKDTLMISRTPEVTCVVVDVSHEDPEVKFNWYVDGVEVHNAKTKPREEQYNSTYRVVSVLTVLHQDWLNGKEYKCKVSNKALGAPIEKTISKAKGQPREPQVCTLPPSRDELTKNQVSLSCAVKGFYPSDIAVEWESNGQPENNYKTTPPVLDSDGSFFLVSKLTVDKSRWQQGNVFSCSVMHEALHNHYTQKSLSLSPGK

SEQ ID NO: 52 - DNA, 1359 bp, Artificial Sequence
  V9 (VH-CH1)-Fc(hole) P329G LALA
gaggtgcagctggtcgagagcggaggcggcctggtgcagcctggcggcagcctgagactgagctgcgccgccagcggctacagcttcaccggctacaccatgaactgggtccggcaggcacctggcaagggactggaatgggtggccctgatcaacccctacaagggcgtgagcacctacaaccagaagttcaaggaccggttcaccatcagcgtggacaagagcaagaacaccgcctatctgcagatgaacagcctgcgggccgaggacaccgccgtgtactactgcgccagaagcggctactacggcgacagcgactggtacttcgacgtgtggggccagggcaccctcgtgaccgtgtctagcgctagcaccaagggcccctccgtgttccccctggcccccagcagcaagagcaccagcggcggcacagccgctctgggctgcctggtcaaggactacttccccgagcccgtgaccgtgtcctggaacagcggagccctgacctccggcgtgcacaccttccccgccgtgctgcagagttctggcctgtatagcctgagcagcgtggtcaccgtgccttctagcagcctgggcacccagacctacatctgcaacgtgaaccacaagcccagcaacaccaaggtggacaagaaggtggagcccaagagctgcgacaaaactcacacatgcccaccgtgcccagcacctgaagctgcagggggaccgtcagtcttcctcttccccccaaaacccaaggacaccctcatgatctcccggacccctgaggtcacatgcgtggtggtggacgtgagccacgaagaccctgaggtcaagttcaactggtacgtggacggcgtggaggtgcataatgccaagacaaagccgcgggaggagcagtacaacagcacgtaccgtgtggtcagcgtcctcaccgtcctgcaccaggactggctgaatggcaaggagtacaagtgcaaggtctccaacaaagccctcggcgcccccatcgagaaaaccatctccaaagccaaagggcagccccgagaaccacaggtgtgcaccctgcccccatcccgggatgagctgaccaagaaccaggtcagcctctcgtgcgcagtcaaaggcttctatcccagcgacatcgccgtggagtgggagagcaatgggcagccggagaacaactacaagaccacgcctcccgtgctggactccgacggctccttcttcctcgtgagcaagctcaccgtggacaagagcaggtggcagcaggggaacgtcttctcatgctccgtgatgcatgaggctctgcacaaccactacacgcagaagagcctctccctgtctccgggtaaatga

SEQ ID NO: 53 - protein, 934 aa, Artificial Sequence [sequence omitted]

SEQ ID NO: 54 - DNA, 2805 bp, Artificial Sequence
  V9 (scFab)-GA201 (VH-CH1)-Fc(knob) P329G LALA
gacatccagatgacccagagcccctctagcctgagcgccagcgtgggcgacagagtgaccatcacctgtcgggccagccaggacatcagaaactacctgaactggtatcagcagaagcccggcaaggcccccaagctgctgatctactacacctctagactggaaagcggcgtgcccagccggtttagcggcagcggctccggcaccgactacaccctgaccatcagcagcctgcagcccgaggacttcgccacctactactgccagcagggcaacacactcccctggaccttcggccagggcaccaaggtggagatcaagcgtacggtggccgctcccagcgtgttcatcttcccccccagcgacgagcagctgaagtccggcaccgccagcgtcgtgtgcctgctgaacaacttctacccccgggaggccaaggtgcagtggaaggtggacaacgccctgcagagcggcaacagccaggaaagcgtcaccgagcaggacagcaaggactccacctacagcctgagcagcaccctgaccctgagcaaggccgactacgagaagcacaaggtgtacgcctgcgaagtgacccaccagggcctgtccagccccgtgaccaagagcttcaaccggggcgagtgcagcggcggaggctctggaggcggctctgaaggcggaggaagtgagggcggaggctcagaaggcggcggaagcgaaggtggcggctctggcggcggatccggcgaggtgcagctggtcgagtccggcggaggcctggtgcagcctggcggcagcctgagactgagctgcgccgccagcggctacagcttcaccggctacaccatgaactgggtccggcaggctcctggcaagggcctcgaatgggtggccctgatcaacccctacaagggcgtgagcacctacaaccagaagttcaaggaccggttcaccatcagcgtggacaagagcaagaacaccgcctatctgcagatgaacagcctgcgggccgaggacaccgccgtgtactactgcgccagaagcggctactacggcgacagcgactggtacttcgacgtgtggggccagggcacactggtcaccgtgtccagcgctagcaccaagggcccctccgtgttccccctggcccccagcagcaagagcaccagcggcggcacagccgccctcggctgcctggtcaaggactacttccccgagcccgtgaccgtgtcctggaacagcggagccctgacctccggcgtgcacaccttccccgccgtgctgcagagcagcggcctgtacagcctgtccagcgtggtcaccgtgccctccagcagcctgggcacccagacctacatctgcaacgtgaaccacaagcccagcaataccaaggtggacaagaaggtggagcccaagagctgcgacggcggtggtggctccggaggcggtggatctcaggtgcagctggtgcagtctggggctgaggtgaagaagcctgggtcctcggtgaaggtctcctgcaaggcctctggtttcacattcactgactacaagatacactgggtgcgacaggcccctggacaagggctcgagtggatgggatatttcaaccctaacagcggttatagtacctacgcacagaagttccagggcagggtcaccattaccgcggacaaatccacgagcacagcctacatggagctgagcagcctgagatctgaggacacggccgtgtattactgtgcgagactatccccaggcggttactatgttatggatgcctggggccaagggaccaccgtgaccgtctcctcagctagcaccaagggcccctccgtgttccccctggcccccagcagcaagagcaccagcggcggcacagccgctctgggctgcctggtcaaggactacttccccgagcccgtgaccgtgtcctggaacagcggagccctgacctccggcgtgcacaccttccccgccgtgctgcagagttctggcctgtatagcctgagcagcgtggtcaccgtgccttctagcagcctgggcacccagacctacatctgcaacgtgaaccacaagcccagcaacaccaaggtggacaagaaggtggagcccaagagctgcgacaaaactcacacatgcccaccgtgcccagcacctgaagctgcagggggaccgtcagtcttcctcttccccccaaaacccaaggacaccctcatgatctcccggacccctgaggtcacatgcgtggtggtggacgtgagccacgaagaccctgaggtcaagttcaactggtacgtggacggcgtggaggtgcataatgccaagacaaagccgcgggaggagcagtacaacagcacgtaccgtgtggtcagcgtcctcaccgtcctgcaccaggactggctgaatggcaaggagtacaagtgcaaggtctccaacaaagccctcggcgcccccatcgagaaaaccatctccaaagccaaagggcagccccgagaaccacaggtgtacaccctgcccccatgccgggatgagctgaccaagaaccaggtcagcctgtggtgcctggtcaaaggcttctatcccagcgacatcgccgtggagtgggagagcaatgggcagccggagaacaactacaagaccacgcctcccgtgctggactccgacggctccttcttcctctacagcaagctcaccgtggacaagagcaggtggcagcaggggaacgtcttctcatgctccgtgatgcatgaggctctgcacaaccactacacgcagaagagcctctccctgtctccgggtaaatga

SEQ ID NO: 55 - protein, 694 aa, Artificial Sequence
  3F2 (scFab)-Fc(knob) P329G LALA
EIVLTQSPGTLSLSPGERATLSCRASQSVTSSYLAWYQQKPGQAPRLLINVGSRRATGIPDRFSGSGSGTDFTLTISRLEPEDFAVYYCQQGIMLPPTFGQGTKVEIKRTVAAPSVFIFPPSDEQLKSGTASVVCLLNNFYPREAKVQWKVDNALQSGNSQESVTEQDSKDSTYSLSSTLTLSKADYEKHKVYACEVTHQGLSSPVTKSFNRGECGGGGSGGGGSGGGGSGGGGSGGGGSGGGGSGGEVQLLESGGGLVQPGGSLRLSCAASGFTFSSYAMSWVRQAPGKGLEWVSAISGSGGSTYYADSVKGRFTISRDNSKNTLYLQMNSLRAEDTAVYYCAKGWFGGFNYWGQGTLVTVSSASTKGPSVFPLAPSSKSTSGGTAALGCLVKDYFPEPVTVSWNSGALTSGVHTFPAVLQSSGLYSLSSVVTVPSSSLGTQTYICNVNHKPSNTKVDKKVEPKSCDKTHTCPPCPAPEAAGGPSVFLFPPKPKDTLMISRTPEVTCVVVDVSHEDPEVKFNWYVDGVEVHNAKTKPREEQYNSTYRVVSVLTVLHQDWLNGKEYKCKVSNKALGAPIEKTISKAKGQPREPQVYTLPPCRDELTKNQVSLWCLVKGFYPSDIAVEWESNGQPENNYKTTPPVLDSDGSFFLYSKLTVDKSRWQQGNVFSCSVMHEALHNHYTQKSLSLSPGK

SEQ ID NO: 56 - DNA, 2085 bp, Artificial Sequence
  3F2 (scFab)-Fc(knob) P329G LALA
gagatcgtgctgacacagagccccggaaccctgtctctgagccctggcgaaagagccaccctgagctgtagagccagccagagcgtgaccagcagctacctggcctggtatcagcagaagcctggacaggcccccagactgctgatcaatgtgggcagcagacgggccaccggcatccctgatagattttctggcagcggcagcggcaccgacttcaccctgaccatcagcagactggaacccgaggacttcgccgtgtactactgccagcagggcatcatgctgccccctacatttggccagggcaccaaggtggaaatcaagcgtacggtggccgctcccagcgtgttcatcttcccacctagcgacgagcagctgaagtctggcacagccagcgtcgtgtgcctgctgaacaacttctacccccgcgaggccaaggtgcagtggaaggtggacaacgccctgcagagcggcaacagccaggaaagcgtcaccgagcaggacagcaaggactccacctacagcctgagcagcaccctgaccctgagcaaggccgactacgagaagcacaaggtgtacgcctgcgaagtgacccaccagggcctgtctagccccgtgaccaagagcttcaaccggggagaatgtggcggcggaggatctggtggcggaggtagtggtggtggtggatctggcggaggcggatccggcggaggtggaagcggaggtggtggaagtgggggagaagtgcagctgctggaaagtggcggaggcctggtgcagcctggcggatctctgagactgagctgtgccgccagcggcttcacctttagcagctacgccatgagctgggtccgacaggcccctggaaagggactggaatgggtgtccgccatctctggctctggcggcagcacctactacgccgatagcgtgaagggccggttcaccatcagccgggacaacagcaagaacaccctgtacctgcagatgaacagcctgcgggccgaggataccgccgtgtattattgcgccaagggatggttcggcggcttcaactattggggccagggaaccctggtcaccgtgtctagtgctagcaccaagggccctagcgtgttccctctggcccctagcagcaagagcacaagtggaggaacagccgccctgggctgcctggtcaaggactacttccccgagcccgtgaccgtgtcctggaattctggcgccctgacaagcggcgtgcacacatttccagccgtgctgcagagcagcggcctgtactctctgagcagcgtcgtgaccgtgccctctagctctctgggcacccagacctacatctgcaacgtgaaccacaagcccagcaacaccaaagtggacaagaaggtggaacccaagagctgcgacaagacccacacctgtcccccttgccctgcccctgaagctgctggtggcccttccgtgttcctgttccccccaaagcccaaggacaccctgatgatcagccggacccccgaagtgacctgcgtggtggtcgatgtgtcccacgaggaccctgaagtgaagttcaattggtacgtggacggcgtggaagtgcacaatgccaagaccaagccgcgggaggagcagtacaacagcacgtaccgtgtggtcagcgtcctcaccgtcctgcaccaggactggctgaatggcaaggagtacaagtgcaaggtctccaacaaagccctcggcgcccccatcgagaaaaccatctccaaagccaaagggcagccccgagaaccacaggtgtacaccctgcccccatgccgggatgagctgaccaagaaccaggtcagcctgtggtgcctggtcaaaggcttctatcccagcgacatcgccgtggagtgggagagcaatgggcagccggagaacaactacaagaccacgcctcccgtgctggactccgacggctccttcttcctctacagcaagctcaccgtggacaagagcaggtggcagcaggggaacgtcttctcatgctccgtgatgcatgaggctctgcacaaccactacacgcagaagagcctctccctgtctccgggtaaataa

SEQ ID NO: 57 - protein, 931 aa, Artificial Sequence
  V9 (scFab)-3F2 (VH-CH1)-Fc(knob) P329G LALA
DIQMTQSPSSLSASVGDRVTITCRASQDIRNYLNWYQQKPGKAPKLLIYYTSRLESGVPSRFSGSGSGTDYTLTISSLQPEDFATYYCQQGNTLPWTFGQGTKVEIKRTVAAPSVFIFPPSDEQLKSGTASVVCLLNNFYPREAKVQWKVDNALQSGNSQESVTEQDSKDSTYSLSSTLTLSKADYEKHKVYACEVTHQGLSSPVTKSFNRGECSGGGSGGGSEGGGSEGGGSEGGGSEGGGSGGGSGEVQLVESGGGLVQPGGSLRLSCAASGYSFTGYTMNWVRQAPGKGLEWVALINPYKGVSTYNQKFKDRFTISVDKSKNTAYLQMNSLRAEDTAVYYCARSGYYGDSDWYFDVWGQGTLVTVSSASTKGPSVFPLAPSSKSTSGGTAALGCLVKDYFPEPVTVSWNSGALTSGVHTFPAVLQSSGLYSLSSVVTVPSSSLGTQTYICNVNHKPSNTKVDKKVEPKSCDGGGGSGGGGSEVQLLESGGGLVQPGGSLRLSCAASGFTFSSYAMSWVRQAPGKGLEWVSAISGSGGSTYYADSVKGRFTISRDNSKNTLYLQMNSLRAEDTAVYYCAKGWFGGFNYWGQGTLVTVSSASTKGPSVFPLAPSSKSTSGGTAALGCLVKDYFPEPVTVSWNSGALTSGVHTFPAVLQSSGLYSLSSVVTVPSSSLGTQTYICNVNHKPSNTKVDKKVEPKSCDKTHTCPPCPAPEAAGGPSVFLFPPKPKDTLMISRTPEVTCVVVDVSHEDPEVKFNWYVDGVEVHNAKTKPREEQYNSTYRVVSVLTVLHQDWLNGKEYKCKVSNKALGAPIEKTISKAKGQPREPQVYTLPPCRDELTKNQVSLWCLVKGFYPSDIAVEWESNGQPENNYKTTPPVLDSDGSFFLYSKLTVDKSRWQQGNVFSCSVMHEALHNHYTQKSLSLSPGK

SEQ ID NO: 58 - DNA, 2796 bp, Artificial Sequence
  V9 (scFab)-3F2 (VH-CH1)-Fc(knob) P329G LALA
gacatccagatgacccagagcccctctagcctgagcgccagcgtgggcgacagagtgaccatcacctgtcgggccagccaggacatcagaaactacctgaactggtatcagcagaagcccggcaaggcccccaagctgctgatctactacacctctagactggaaagcggcgtgcccagccggtttagcggcagcggctccggcaccgactacaccctgaccatcagcagcctgcagcccgaggacttcgccacctactactgccagcagggcaacacactcccctggaccttcggccagggcaccaaggtggagatcaagcgtacggtggccgctcccagcgtgttcatcttcccccccagcgacgagcagctgaagtccggcaccgccagcgtcgtgtgcctgctgaacaacttctacccccgggaggccaaggtgcagtggaaggtggacaacgccctgcagagcggcaacagccaggaaagcgtcaccgagcaggacagcaaggactccacctacagcctgagcagcaccctgaccctgagcaaggccgactacgagaagcacaaggtgtacgcctgcgaagtgacccaccagggcctgtccagccccgtgaccaagagcttcaaccggggcgagtgcagcggcggaggctctggaggcggctctgaaggcggaggaagtgagggcggaggctcagaaggcggcggaagcgaaggtggcggctctggcggcggatccggcgaggtgcagctggtcgagtccggcggaggcctggtgcagcctggcggcagcctgagactgagctgcgccgccagcggctacagcttcaccggctacaccatgaactgggtccggcaggctcctggcaagggcctcgaatgggtggccctgatcaacccctacaagggcgtgagcacctacaaccagaagttcaaggaccggttcaccatcagcgtggacaagagcaagaacaccgcctatctgcagatgaacagcctgcgggccgaggacaccgccgtgtactactgcgccagaagcggctactacggcgacagcgactggtacttcgacgtgtggggccagggcacactggtcaccgtgtccagcgctagcaccaagggcccctccgtgttccccctggcccccagcagcaagagcaccagcggcggcacagccgccctcggctgcctggtcaaggactacttccccgagcccgtgaccgtgtcctggaacagcggagccctgacctccggcgtgcacaccttccccgccgtgctgcagagcagcggcctgtacagcctgtccagcgtggtcaccgtgccctccagcagcctgggcacccagacctacatctgcaacgtgaaccacaagcccagcaataccaaggtggacaagaaggtggagcccaagagctgcgacggcggtggtggctccggaggaggaggcagcgaggtgcagctgctggaatctggaggcggcctggtgcagcctggcggcagcctgagactgtcttgcgccgccagcggcttcaccttcagcagctacgccatgagctgggtccgacaggctcctggcaagggactggaatgggtgtccgccatctccggcagcggaggcagcacctactacgccgacagcgtgaagggccggttcaccatcagcagagacaacagcaagaacaccctgtacctgcagatgaacagcctgcgggccgaggataccgccgtgtattattgcgccaagggatggttcggcggcttcaactactggggccagggaaccctggtgacagtgtccagcgccagcaccaagggcccctccgtgtttcctctggcccccagcagcaagagcacctctggcggaacagccgccctgggctgcctggtgaaagactacttccccgagcccgtgaccgtgtcctggaactctggcgccctgaccagcggcgtgcacacctttccagccgtgctgcagagcagcggcctgtactccctgagcagcgtggtgacagtgccctccagcagcctgggcacccagacctacatctgcaacgtgaaccacaagcccagcaacaccaaagtggacaagaaggtggaacccaagagctgcgacaaaactcacacatgcccaccgtgcccagcacctgaagctgcagggggaccgtcagtcttcctcttccccccaaaacccaaggacaccctcatgatctcccggacccctgaggtcacatgcgtggtggtggacgtgagccacgaagaccctgaggtcaagttcaactggtacgtggacggcgtggaggtgcataatgccaagacaaagccgcgggaggagcagtacaacagcacgtaccgtgtggtcagcgtcctcaccgtcctgcaccaggactggctgaatggcaaggagtacaagtgcaaggtctccaacaaagccctcggcgcccccatcgagaaaaccatctccaaagccaaagggcagccccgagaaccacaggtgtacaccctgcccccatgccgggatgagctgaccaagaaccaggtcagcctgtggtgcctggtcaaaggcttctatcccagcgacatcgccgtggagtgggagagcaatgggcagccggagaacaactacaagaccacgcctcccgtgctggactccgacggctccttcttcctctacagcaagctcaccgtggacaagagcaggtggcagcaggggaacgtcttctcatgctccgtgatgcatgaggctctgcacaaccactacacgcagaagagcctctccctgtctccgggtaaatga

SEQ ID NO: 59 - protein, 447 aa, Artificial Sequence
  3F2 (VH-CH1)-Fc(hole) P329G LALA
EVQLLESGGGLVQPGGSLRLSCAASGFTFSSYAMSWVRQAPGKGLEWVSAISGSGGSTYYADSVKGRFTISRDNSKNTLYLQMNSLRAEDTAVYYCAKGWFGGFNYWGQGTLVTVSSASTKGPSVFPLAPSSKSTSGGTAALGCLVKDYFPEPVTVSWNSGALTSGVHTFPAVLQSSGLYSLSSVVTVPSSSLGTQTYICNVNHKPSNTKVDKKVEPKSCDKTHTCPPCPAPEAAGGPSVFLFPPKPKDTLMISRTPEVTCVVVDVSHEDPEVKFNWYVDGVEVHNAKTKPREEQYNSTYRVVSVLTVLHQDWLNGKEYKCKVSNKALGAPIEKTISKAKGQPREPQVCTLPPSRDELTKNQVSLSCAVKGFYPSDIAVEWESNGQPENNYKTTPPVLDSDGSFFLVSKLTVDKSRWQQGNVFSCSVMHEALHNHYTQKSLSLSPGK

SEQ ID NO: 60 - DNA, 1344 bp, Artificial Sequence
  3F2 (VH-CH1)-Fc(hole) P329G LALA
gaggtgcagctgctggaatctggaggcggcctggtgcagcctggcggcagcctgagactgtcttgcgccgccagcggcttcaccttcagcagctacgccatgagctgggtccgacaggctcctggcaagggactggaatgggtgtccgccatctccggcagcggaggcagcacctactacgccgacagcgtgaagggccggttcaccatcagcagagacaacagcaagaacaccctgtacctgcagatgaacagcctgcgggccgaggataccgccgtgtattattgcgccaagggatggttcggcggcttcaactactggggccagggaaccctggtgacagtgtccagcgccagcaccaagggcccctccgtgtttcctctggcccccagcagcaagagcacctctggcggaacagccgccctgggctgcctggtgaaagactacttccccgagcccgtgaccgtgtcctggaactctggcgccctgaccagcggcgtgcacacctttccagccgtgctgcagagcagcggcctgtactccctgagcagcgtggtgacagtgccctccagcagcctgggcacccagacctacatctgcaacgtgaaccacaagcccagcaacaccaaagtggacaagaaggtggaacccaagagctgcgacaaaactcacacatgcccaccgtgcccagcacctgaagctgcagggggaccgtcagtcttcctcttccccccaaaacccaaggacaccctcatgatctcccggacccctgaggtcacatgcgtggtggtggacgtgagccacgaagaccctgaggtcaagttcaactggtacgtggacggcgtggaggtgcataatgccaagacaaagccgcgggaggagcagtacaacagcacgtaccgtgtggtcagcgtcctcaccgtcctgcaccaggactggctgaatggcaaggagtacaagtgcaaggtctccaacaaagccctcggcgcccccatcgagaaaaccatctccaaagccaaagggcagccccgagaaccacaggtgtgcaccctgcccccatcccgggatgagctgaccaagaaccaggtcagcctctcgtgcgcagtcaaaggcttctatcccagcgacatcgccgtggagtgggagagcaatgggcagccggagaacaactacaagaccacgcctcccgtgctggactccgacggctccttcttcctcgtgagcaagctcaccgtggacaagagcaggtggcagcaggggaacgtcttctcatgctccgtgatgcatgaggctctgcacaaccactacacgcagaagagcctctccctgtctccgggtaaatga

SEQ ID NO: 61 - protein, 215 aa, Artificial Sequence
  3F2 (VL-CL)
EIVLTQSPGTLSLSPGERATLSCRASQSVTSSYLAWYQQKPGQAPRLLINVGSRRATGIPDRFSGSGSGTDFTLTISRLEPEDFAVYYCQQGIMLPPTFGQGTKVEIKRTVAAPSVFIFPPSDEQLKSGTASVVCLLNNFYPREAKVQWKVDNALQSGNSQESVTEQDSKDSTYSLSSTLTLSKADYEKHKVYACEVTHQGLSSPVTKSFNRGEC

SEQ ID NO: 62 - DNA, 648 bp, Artificial Sequence
  3F2 (VL-CL)
gagatcgtgctgacccagtctcccggcaccctgagcctgagccctggcgagagagccaccctgagctgcagagccagccagagcgtgaccagcagctacctggcctggtatcagcagaagcccggccaggcccccagactgctgatcaacgtgggcagcagacgggccaccggcatccccgatagattcagcggcagcggctccggcaccgacttcaccctgaccatcagccggctggaacccgaggacttcgccgtgtactactgccagcagggcatcatgctgccccccaccttcggccagggcaccaaggtggaaatcaagcggaccgtggccgctcccagcgtgttcatcttcccacccagcgacgagcagctgaagtccggcacagccagcgtggtgtgcctgctgaacaacttctacccccgcgaggccaaggtgcagtggaaggtggacaacgccctgcagagcggcaacagccaggaatccgtgaccgagcaggacagcaaggactccacctacagcctgagcagcaccctgaccctgagcaaggccgactacgagaagcacaaggtgtacgcctgcgaagtgacccaccagggcctgtccagccccgtgaccaagagcttcaaccggggcgagtgctga

SEQ ID NO: 63 - protein, 673 aa, Artificial Sequence
  CH1A1A (VH-CH1)- V9 (VL-CH1)-Fc(knob) P329G LALA
QVQLVQSGAEVKKPGASVKVSCKASGYTFTEFGMNWVRQAPGQGLEWMGWINTKTGEATYVEEFKGRVTFTTDTSTSTAYMELRSLRSDDTAVYYCARWDFAYYVEAMDYWGQGTTVTVSSASTKGPSVFPLAPSSKSTSGGTAALGCLVKDYFPEPVTVSWNSGALTSGVHTFPAVLQSSGLYSLSSVVTVPSSSLGTQTYICNVNHKPSNTKVDKKVEPKSCGGGGSGGGGSDIQMTQSPSSLSASVGDRVTITCRASQDIRNYLNWYQQKPGKAPKLLIYYTSRLESGVPSRFSGSGSGTDYTLTISSLQPEDFATYYCQQGNTLPWTFGQGTKVEIKSSASTKGPSVFPLAPSSKSTSGGTAALGCLVKDYFPEPVTVSWNSGALTSGVHTFPAVLQSSGLYSLSSVVTVPSSSLGTQTYICNVNHKPSNTKVDKKVEPKSCDKTHTCPPCPAPEAAGGPSVFLFPPKPKDTLMISRTPEVTCVVVDVSHEDPEVKFNWYVDGVEVHNAKTKPREEQYNSTYRVVSVLTVLHQDWLNGKEYKCKVSNKALGAPIEKTISKAKGQPREPQVYTLPPCRDELTKNQVSLWCLVKGFYPSDIAVEWESNGQPENNYKTTPPVLDSDGSFFLYSKLTVDKSRWQQGNVFSCSVMHEALHNHYTQKSLSLSPGK

SEQ ID NO: 64 - DNA, 2022 bp, Artificial Sequence
  CH1A1A (VH-CH1)- V9 (VL-CH1)-Fc(knob) P329G LALA
caggtgcagctggtgcagtctggcgccgaagtgaagaaacctggcgccagcgtgaaggtgtcctgcaaggccagcggctacaccttcaccgagttcggcatgaactgggtccgacaggcccctggacagggcctggaatggatgggctggatcaacaccaagaccggcgaggccacctacgtggaagagttcaagggcagagtgaccttcaccaccgacaccagcaccagcaccgcctacatggaactgcggagcctgagaagcgacgacaccgccgtgtactactgcgccagatgggacttcgcctactatgtggaagccatggactactggggccagggcaccaccgtgaccgtgtctagtgctagcacaaagggccccagcgtgttccctctggcccctagcagcaagagcacatctggcggaacagccgccctgggctgcctggtcaaggactactttcccgagcccgtgacagtgtcctggaactctggcgccctgacaagcggcgtgcacacctttccagccgtgctgcagagcagcggcctgtactctctgagcagcgtggtcaccgtgcctagctctagcctgggcacccagacctacatctgcaacgtgaaccacaagcccagcaacaccaaggtggacaagaaggtggaacccaagagctgcggcggaggcggatccggaggcggaggatctgatatccagatgacccagagccccagcagcctgtctgccagcgtgggcgacagagtgaccattacctgcagagccagccaggacatcagaaactacctgaactggtatcagcagaagcccggcaaggcccccaagctgctgatctactacaccagcagactggaatccggcgtgcccagcagattttccggcagcggctctggcaccgactacaccctgacaatcagcagcctgcagcccgaggacttcgccacctactactgccagcagggcaacaccctgccctggacatttggacagggcacaaaggtggaaatcaagagcagcgcctccaccaagggcccttccgtgtttccactggcccccagctctaagagcaccagcggaggaacagctgctctgggatgtctcgtgaaggattacttccccgaacctgtgaccgtcagctggaacagcggcgctctgacatctggggtgcacacattccccgctgtcctgcagtcctccggcctgtacagtctgtccagcgtcgtgacagtgcctagcagctccctgggaacacagacatatatctgtaatgtcaatcacaagccctctaataccaaggtcgacaaaaaagtcgagcccaagtcctgcgacaagacccacacctgtcccccttgtcctgcccctgaagctgctggcggcccttctgtgttcctgttccccccaaagcccaaggacaccctgatgatcagccggacccccgaagtgacctgcgtggtggtggatgtgtcccacgaggaccctgaagtgaagttcaattggtacgtggacggcgtggaagtgcacaacgccaagacaaagccgcgggaggagcagtacaacagcacgtaccgtgtggtcagcgtcctcaccgtcctgcaccaggactggctgaatggcaaggagtacaagtgcaaggtctccaacaaagccctcggcgcccccatcgagaaaaccatctccaaagccaaagggcagccccgagaaccacaggtgtacaccctgcccccatgccgggatgagctgaccaagaaccaggtcagcctgtggtgcctggtcaaaggcttctatcccagcgacatcgccgtggagtgggagagcaatgggcagccggagaacaactacaagaccacgcctcccgtgctggactccgacggctccttcttcctctacagcaagctcaccgtggacaagagcaggtggcagcaggggaacgtcttctcatgctccgtgatgcatgaggctctgcacaaccactacacgcagaagagcctctccctgtctccgggtaaatga

SEQ ID NO: 65 - protein, 451 aa, Artificial Sequence
  CH1A1A (VH-CH1)-Fc(hole) P329G LALA
QVQLVQSGAEVKKPGASVKVSCKASGYTFTEFGMNWVRQAPGQGLEWMGWINTKTGEATYVEEFKGRVTFTTDTSTSTAYMELRSLRSDDTAVYYCARWDFAYYVEAMDYWGQGTTVTVSSASTKGPSVFPLAPSSKSTSGGTAALGCLVKDYFPEPVTVSWNSGALTSGVHTFPAVLQSSGLYSLSSVVTVPSSSLGTQTYICNVNHKPSNTKVDKKVEPKSCDKTHTCPPCPAPEAAGGPSVFLFPPKPKDTLMISRTPEVTCVVVDVSHEDPEVKFNWYVDGVEVHNAKTKPREEQYNSTYRVVSVLTVLHQDWLNGKEYKCKVSNKALGAPIEKTISKAKGQPREPQVCTLPPSRDELTKNQVSLSCAVKGFYPSDIAVEWESNGQPENNYKTTPPVLDSDGSFFLVSKLTVDKSRWQQGNVFSCSVMHEALHNHYTQKSLSLSPGK

SEQ ID NO: 66 - DNA, 1356 bp, Artificial Sequence
  CH1A1A (VH-CH1)-Fc(hole) P329G LALA
caggtgcagctggtgcagtctggcgccgaagtgaagaaacctggagctagtgtgaaggtgtcctgcaaggccagcggctacaccttcaccgagttcggcatgaactgggtccgacaggctccaggccagggcctcgaatggatgggctggatcaacaccaagaccggcgaggccacctacgtggaagagttcaagggcagagtgaccttcaccacggacaccagcaccagcaccgcctacatggaactgcggagcctgagaagcgacgacaccgccgtgtactactgcgccagatgggacttcgcctattacgtggaagccatggactactggggccagggcaccaccgtgaccgtgtctagcgctagcaccaagggcccctccgtgttccccctggcccccagcagcaagagcaccagcggcggcacagccgctctgggctgcctggtcaaggactacttccccgagcccgtgaccgtgtcctggaacagcggagccctgacctccggcgtgcacaccttccccgccgtgctgcagagttctggcctgtatagcctgagcagcgtggtcaccgtgccttctagcagcctgggcacccagacctacatctgcaacgtgaaccacaagcccagcaacaccaaggtggacaagaaggtggagcccaagagctgcgacaaaactcacacatgcccaccgtgcccagcacctgaagctgcagggggaccgtcagtcttcctcttccccccaaaacccaaggacaccctcatgatctcccggacccctgaggtcacatgcgtggtggtggacgtgagccacgaagaccctgaggtcaagttcaactggtacgtggacggcgtggaggtgcataatgccaagacaaagccgcgggaggagcagtacaacagcacgtaccgtgtggtcagcgtcctcaccgtcctgcaccaggactggctgaatggcaaggagtacaagtgcaaggtctccaacaaagccctcggcgcccccatcgagaaaaccatctccaaagccaaagggcagccccgagaaccacaggtgtgcaccctgcccccatcccgggatgagctgaccaagaaccaggtcagcctctcgtgcgcagtcaaaggcttctatcccagcgacatcgccgtggagtgggagagcaatgggcagccggagaacaactacaagaccacgcctcccgtgctggactccgacggctccttcttcctcgtgagcaagctcaccgtggacaagagcaggtggcagcaggggaacgtcttctcatgctccgtgatgcatgaggctctgcacaaccactacacgcagaagagcctctccctgtctccgggtaaatga

SEQ ID NO: 67 - protein, 215 aa, Artificial Sequence
  CH1A1A (VL-CL)
DIQMTQSPSSLSASVGDRVTITCKASAAVGTYVAWYQQKPGKAPKLLIYSASYRKRGVPSRFSGSGSGTDFTLTISSLQPEDFATYYCHQYYTYPLFTFGQGTKLEIKRTVAAPSVFIFPPSDEQLKSGTASVVCLLNNFYPREAKVQWKVDNALQSGNSQESVTEQDSKDSTYSLSSTLTLSKADYEKHKVYACEVTHQGLSSPVTKSFNRGEC

SEQ ID NO: 68 - DNA, 648 bp, Artificial Sequence
  CH1A1A (VL-CL)
gatatccagatgacccagtctccatcctccctgtctgcatctgtgggagacagagtcaccatcacttgcaaggccagtgcggctgtgggtacgtatgttgcgtggtatcagcagaaaccagggaaagcacctaagctcctgatctattcggcatcctaccgcaaaaggggagtcccatcaaggttcagtggcagtggatctgggacagatttcactctcaccatcagcagtctgcaacctgaagatttcgcaacttactactgtcaccaatattacacctatcctctattcacgtttggccagggcaccaagctcgagatcaagcgtacggtggctgcaccatctgtcttcatcttcccgccatctgatgagcagttgaaatctggaactgcctctgttgtgtgcctgctgaataacttctatcccagagaggccaaagtacagtggaaggtggataacgccctccaatcgggtaactcccaggagagtgtcacagagcaggacagcaaggacagcacctacagcctcagcagcaccctgacgctgagcaaagcagactacgagaaacacaaagtctacgcctgcgaagtcacccatcagggcctgagctcgcccgtcacaaagagcttcaacaggggagagtgttag

SEQ ID NO: 69 - protein, 11 aa, Artificial Sequence
  LC007 HCDR1
GYSITSGYYWN

SEQ ID NO: 70 - DNA, 33 bp, Artificial Sequence
  LC007 HCDR1
ggctactccatcaccagtggttattactggaac

SEQ ID NO: 71 - protein, 16 aa, Artificial Sequence
  LC007 HCDR2
YITYDGSNNYNPSLKN

SEQ ID NO: 72 - DNA, 48 bp, Artificial Sequence
  LC007 HCDR2
tacataacctacgacggtagcaataactacaacccatctctcaaaaat

SEQ ID NO: 73 - protein, 3 aa, Artificial Sequence
  LC007 HCDR3
FDY

SEQ ID NO: 74 - DNA, 9 bp, Artificial Sequence
  LC007 HCDR3
tttgactac

SEQ ID NO: 75 - protein, 112 aa, Artificial Sequence
  LC007 VH
EVQLQESGPGLVKPSQSLSLTCSVTGYSITSGYYWNWIRQFPGNKLEWMGYITYDGSNNYNPSLKNRISITRDTSKNQFFLKLNSVTTEDTATYYCADFDYWGQGTTLTVSS

SEQ ID NO: 76 - DNA, 336 bp, Artificial Sequence
  LC007 VH
gaggtccagctgcaggagtcaggacctggcctcgtgaaaccttctcagtctctgtctctcacctgctctgtcactggctactccatcaccagtggttattactggaactggatccggcagtttccaggaaacaagctggaatggatgggctacataacctacgacggtagcaataactacaacccatctctcaaaaatcgaatctccatcactcgtgacacatctaagaaccagtttttcctgaagttgaattctgtgactactgaggacacagctacatattactgtgcggactttgactactggggccaaggcaccactctcacagtctcctca

SEQ ID NO: 77 - protein, 11 aa, Artificial Sequence
  LC007 LCDR1
SASQGIRNYLN

SEQ ID NO: 78 - DNA, 33 bp, Artificial Sequence
  LC007 LCDR1
agtgcaagtcagggcattagaaattatttaaac

SEQ ID NO: 79 - protein, 7 aa, Artificial Sequence
  LC007 LCDR2
YTSSLHS

SEQ ID NO: 80 - DNA, 21 bp, Artificial Sequence
  LC007 LCDR2
tacacatcaagtttacactca

SEQ ID NO: 81 - protein, 9 aa, Artificial Sequence
  LC007 LCDR3
QQYSKLPWT

SEQ ID NO: 82 - DNA, 27 bp, Artificial Sequence
  LC007 LCDR3
cagcagtatagtaagcttccttggacg

SEQ ID NO: 83 - protein, 107 aa, Artificial Sequence
  LC007 VL
DIVLTQSPSSLSASLGDRVTISCSASQGIRNYLNWYQQRPDGTVKLLIYYTSSLHSGVPSRFSGSGSGTDYSLTISNLEPEDIATYYCQQYSKLPWTFGGGTKLEIK

SEQ ID NO: 84 - DNA, 321 bp, Artificial Sequence
  LC007 VL
gatattgtgctcacacagtctccatcctccctgtctgcctctctgggagacagagtcaccatcagttgcagtgcaagtcagggcattagaaattatttaaactggtatcagcagagaccagatggaactgttaaactcctgatctattacacatcaagtttacactcaggagtcccatcaaggttcagtggcagtgggtctgggacagattattctctcaccatcagcaacctggaacctgaagatattgccacttactattgtcagcagtatagtaagcttccttggacgttcggtggaggcaccaagctggaaatcaaa

SEQ ID NO: 85 - protein, 5 aa, Artificial Sequence
  GA201 HCDR1
DYKIH

SEQ ID NO: 86 - DNA, 15 bp, Artificial Sequence
  GA201 HCDR1
gactacaagatacac

SEQ ID NO: 87 - protein, 17 aa, Artificial Sequence
  GA201 HCDR2
YFNPNSGYSTYAQKFQG

SEQ ID NO: 88 - DNA, 51 bp, Artificial Sequence
  GA201 HCDR2
tatttcaaccctaacagcggttatagtacctacgcacagaagttccagggc

SEQ ID NO: 89 - protein, 11 aa, Artificial Sequence
  GA201 HCDR3
LSPGGYYVMDA

SEQ ID NO: 90 - DNA, 33 bp, Artificial Sequence
  GA201 HCDR3
ctatccccaggcggttactatgttatggatgcc

SEQ ID NO: 91 - protein, 120 aa, Artificial Sequence [sequence omitted]

SEQ ID NO: 92 - DNA, 360 bp, Artificial Sequence
  GA201 VH
caggtgcagctggtgcagtctggggctgaggtgaagaagcctgggtcctcggtgaaggtctcctgcaaggcctctggtttcacattcactgactacaagatacactgggtgcgacaggcccctggacaagggctcgagtggatgggatatttcaaccctaacagcggttatagtacctacgcacagaagttccagggcagggtcaccattaccgcggacaaatccacgagcacagcctacatggagctgagcagcctgagatctgaggacacggccgtgtattactgtgcgagactatccccaggcggttactatgttatggatgcctggggccaagggaccaccgtgaccgtctcctca

SEQ ID NO: 93 - protein, 11 aa, Artificial Sequence
  GA201 LCDR1
RASQGINNYLN

SEQ ID NO: 94 - DNA, 33 bp, Artificial Sequence
  GA201 LCDR1
cgggcaagtcagggcattaacaattacttaaat

SEQ ID NO: 95 - protein, 7 aa, Artificial Sequence
  GA201 LCDR2
NTNNLQT

SEQ ID NO: 96 - DNA, 21 bp, Artificial Sequence
  GA201 LCDR2
aataccaacaacttgcagaca

SEQ ID NO: 97 - protein, 8 aa, Artificial Sequence
  GA201 LCDR3
LQHNSFPT

SEQ ID NO: 98 - DNA, 24 bp, Artificial Sequence
  GA201 LCDR3
ttgcagcataatagttttcccacg

SEQ ID NO: 99 - protein, 106 aa, Artificial Sequence [sequence omitted]

SEQ ID NO: 100 - DNA, 318 bp, Artificial Sequence
  GA201 VL
gatatccagatgacccagtctccatcctccctgtctgcatctgtcggagaccgggtcaccatcacctgccgggcaagtcagggcattaacaattacttaaattggtaccagcagaagccagggaaagcccctaagcgcctgatctataataccaacaacttgcagacaggcgtcccatcaaggttcagcggcagtggatccgggacagaattcactctcaccatcagcagcctgcagcctgaagattttgccacctattactgcttgcagcataatagttttcccacgtttggccagggcaccaagctcgagatcaag

SEQ ID NO: 101 - protein, 5 aa, Artificial Sequence
  3F2 HCDR1
SYAMS

SEQ ID NO: 102 - DNA, 15 bp, Artificial Sequence
  3F2 HCDR1
agctacgccatgagc

SEQ ID NO: 103 - protein, 16 aa, Artificial Sequence
  3F2 HCDR2
AISGSGGSTYYADSVK

SEQ ID NO: 104 - DNA, 48 bp, Artificial Sequence
  3F2 HCDR2
gccatctccggcagcggaggcagcacctactacgccgacagcgtgaag

SEQ ID NO: 105 - protein, 8 aa, Artificial Sequence
  3F2 HCDR3
YCAKGWFG

SEQ ID NO: 106 - DNA, 24 bp, Artificial Sequence
  3F2 HCDR3
tattgcgccaagggatggttcggc

SEQ ID NO: 107 - protein, 117 aa, Artificial Sequence
  3F2 VH
EVQLLESGGGLVQPGGSLRLSCAASGFTFSSYAMSWVRQAPGKGLEWVSAISGSGGSTYYADSVKGRFTISRDNSKNTLYLQMNSLRAEDTAVYYCAKGWFGGFNYWGQGTLVTVSS

SEQ ID NO: 108 - DNA, 351 bp, Artificial Sequence
  3F2 VH
gaggtgcagctgctggaatctggaggcggcctggtgcagcctggcggcagcctgagactgtcttgcgccgccagcggcttcaccttcagcagctacgccatgagctgggtccgacaggctcctggcaagggactggaatgggtgtccgccatctccggcagcggaggcagcacctactacgccgacagcgtgaagggccggttcaccatcagcagagacaacagcaagaacaccctgtacctgcagatgaacagcctgcgggccgaggataccgccgtgtattattgcgccaagggatggttcggcggcttcaactactggggccagggaaccctggtgacagtgtccagc

SEQ ID NO: 109 - protein, 11 aa, Artificial Sequence
  3F2 LCDR1
RASQSVTSSYL

SEQ ID NO: 110 - DNA, 33 bp, Artificial Sequence
  3F2 LCDR1
agagccagccagagcgtgaccagcagctacctg

SEQ ID NO: 111 - protein, 7 aa, Artificial Sequence
  3F2 LCDR2
NVGSRRA

SEQ ID NO: 112 - DNA, 21 bp, Artificial Sequence
  3F2 LCDR2
aacgtgggcagcagacgggcc

SEQ ID NO: 113 - protein, 9 aa, Artificial Sequence
  3F2 LCDR3
CQQGIMLPP

SEQ ID NO: 114 - DNA, 27 bp, Artificial Sequence
  3F2 LCDR3
tgccagcagggcatcatgctgcccccc

SEQ ID NO: 115 - protein, 108 aa, Artificial Sequence
  3F2 VL
EIVLTQSPGTLSLSPGERATLSCRASQSVTSSYLAWYQQKPGQAPRLLINVGSRRATGIPDRFSGSGSGTDFTLTISRLEPEDFAVYYCQQGIMLPPTFGQGTKVEIK

SEQ ID NO: 116 - DNA, 324 bp, Artificial Sequence
  3F2 VL
gagatcgtgctgacccagtctcccggcaccctgagcctgagccctggcgagagagccaccctgagctgcagagccagccagagcgtgaccagcagctacctggcctggtatcagcagaagcccggccaggcccccagactgctgatcaacgtgggcagcagacgggccaccggcatccccgatagattcagcggcagcggctccggcaccgacttcaccctgaccatcagccggctggaacccgaggacttcgccgtgtactactgccagcagggcatcatgctgccccccaccttcggccagggcaccaaggtggaaatcaag

SEQ ID NO: 117 - protein, 5 aa, Artificial Sequence
  CH1A1A HCDR1
EFGMN

SEQ ID NO: 118 - DNA, 15 bp, Artificial Sequence
  CH1A1A HCDR1
gagttcggcatgaac

SEQ ID NO: 119 - protein, 17 aa, Artificial Sequence
  CH1A1A HCDR2
WINTKTGEATYVEEFKG

SEQ ID NO: 120 - DNA, 51 bp, Artificial Sequence
  CH1A1A HCDR2
tggatcaacaccaagaccggcgaggccacctacgtggaagagttcaagggc

SEQ ID NO: 121 - protein, 12 aa, Artificial Sequence
  CH1A1A HCDR3
WDFAYYVEAMDY

SEQ ID NO: 122 - DNA, 36 bp, Artificial Sequence
  CH1A1A HCDR3
tgggacttcgcctattacgtggaagccatggactac

SEQ ID NO: 123 - protein, 121 aa, Artificial Sequence
  CH1A1A VH
QVQLVQSGAEVKKPGASVKVSCKASGYTFTEFGMNWVRQAPGQGLEWMGWINTKTGEATYVEEFKGRVTFTTDTSTSTAYMELRSLRSDDTAVYYCARWDFAYYVEAMDYWGQGTTVTVSS

SEQ ID NO: 124 - DNA, 363 bp, Artificial Sequence
  CH1A1A VH
caggtgcagctggtgcagtctggcgccgaagtgaagaaacctggagctagtgtgaaggtgtcctgcaaggccagcggctacaccttcaccgagttcggcatgaactgggtccgacaggctccaggccagggcctcgaatggatgggctggatcaacaccaagaccggcgaggccacctacgtggaagagttcaagggcagagtgaccttcaccacggacaccagcaccagcaccgcctacatggaactgcggagcctgagaagcgacgacaccgccgtgtactactgcgccagatgggacttcgcctattacgtggaagccatggactactggggccagggcaccaccgtgaccgtgtctagc

SEQ ID NO: 125 - protein, 11 aa, Artificial Sequence
  CH1A1A LCDR1
KASAAVGTYVA

SEQ ID NO: 126 - DNA, 33 bp, Artificial Sequence
  CH1A1A LCDR1
aaggccagtgcggctgtgggtacgtatgttgcg

SEQ ID NO: 127 - protein, 7 aa, Artificial Sequence
  CH1A1A LCDR2
SASYRKR

SEQ ID NO: 128 - DNA, 21 bp, Artificial Sequence
  CH1A1A LCDR2
tcggcatcctaccgcaaaagg

SEQ ID NO: 129 - protein, 10 aa, Artificial Sequence
  CH1A1A LCDR3
HQYYTYPLFT

SEQ ID NO: 130 - DNA, 30 bp, Artificial Sequence
  CH1A1A LCDR3
caccaatattacacctatcctctattcacg

SEQ ID NO: 131 - protein, 108 aa, Artificial Sequence
  CH1A1A VL
DIQMTQSPSSLSASVGDRVTITCKASAAVGTYVAWYQQKPGKAPKLLIYSASYRKRGVPSRFSGSGSGTDFTLTISSLQPEDFATYYCHQYYTYPLFTFGQGTKLEIK

SEQ ID NO: 132 - DNA, 324 bp, Artificial Sequence
  CH1A1A VL
gatatccagatgacccagtctccatcctccctgtctgcatctgtgggagacagagtcaccatcacttgcaaggccagtgcggctgtgggtacgtatgttgcgtggtatcagcagaaaccagggaaagcacctaagctcctgatctattcggcatcctaccgcaaaaggggagtcccatcaaggttcagtggcagtggatctgggacagatttcactctcaccatcagcagtctgcaacctgaagatttcgcaacttactactgtcaccaatattacacctatcctctattcacgtttggccagggcaccaagctcgagatcaag

SEQ ID NO: 133 - protein, 10 aa, Artificial Sequence
  Anti-CD33 HCDR1
GYTITDSNIH

SEQ ID NO: 134 - DNA, 30 bp, Artificial Sequence
  Anti-CD33 HCDR1
ggctacaccatcaccgacagcaacatccac

SEQ ID NO: 135 - protein, 13 aa, Artificial Sequence
  Anti-CD33 HCDR2
YIYPYNGGTDYNQ

SEQ ID NO: 136 - DNA, 39 bp, Artificial Sequence
  Anti-CD33 HCDR2
tacatctacccctacaacggcggcaccgactacaaccag

SEQ ID NO: 137 - protein, 7 aa, Artificial Sequence
  Anti-CD33 HCDR3
GNPWLAY

SEQ ID NO: 138 - DNA, 21 bp, Artificial Sequence
  Anti-CD33 HCDR3
ggcaacccctggctggcctat

SEQ ID NO: 139 - protein, 116 aa, Artificial Sequence [sequence omitted]

SEQ ID NO: 140 - DNA, 348 bp, Artificial Sequence
  Anti-CD33 VH
gaagtgcagctggtgcagtctggcgccgaagtgaagaaacccggcagcagcgtgaaggtgtcctgcaaggccagcggctacaccatcaccgacagcaacatccactgggtccgacaggcccctgggcagagcctggaatggatcggctacatctacccctacaacggcggcaccgactacaaccagaagttcaagaaccgggccaccctgaccgtggacaaccccaccaacaccgcctacatggaactgagcagcctgcggagcgaggacaccgccttctactactgcgtgaacggcaacccctggctggcctattggggccagggaaccctggtcaccgtgtctagc

SEQ ID NO: 141 - protein, 15 aa, Artificial Sequence
  Anti-CD33 LCDR1
RASESLDNYGIRFLT

SEQ ID NO: 142 - DNA, 45 bp, Artificial Sequence
  Anti-CD33 LCDR1
cgggccagcgagagcctggacaactacggcatccggtttctgacc

SEQ ID NO: 143 - protein, 7 aa, Artificial Sequence
  Anti-CD33 LCDR2
AASNQGS

SEQ ID NO: 144 - DNA, 21 bp, Artificial Sequence
  Anti-CD33 LCDR2
gccgccagcaaccagggcagc

SEQ ID NO: 145 - protein, 9 aa, Artificial Sequence
  Anti-CD33 LCDR3
QQTKEVPWS

SEQ ID NO: 146 - DNA, 27 bp, Artificial Sequence
  Anti-CD33 LCDR3
cagcagaccaaagaggtgccctggtcc

SEQ ID NO: 147 - protein, 111 aa, Artificial Sequence [sequence omitted]

SEQ ID NO: 148 - DNA, 333 bp, Artificial Sequence
  Anti-CD33 VL
gacatccagctgacccagagccccagcaccctgtctgccagcgtgggcgacagagtgaccatcacctgtcgggccagcgagagcctggacaactacggcatccggtttctgacctggttccagcagaagcccggcaaggcccccaagctgctgatgtacgccgccagcaaccagggcagcggcgtgccaagcagattcagcggcagcggctccggcaccgagttcaccctgaccatcagcagcctgcagcccgacgacttcgccacctactactgccagcagaccaaagaggtgccctggtccttcggccagggcaccaaggtggaagtgaag

SEQ ID NO: 149 - protein, 227 aa, Homo sapiens
DKTHTCPPCPAPELLGGPSVFLFPPKPKDTLMISRTPEVTCVVVDVSHEDPEVKFNWYVDGVEVHNAKTKPREEQYNSTYRVVSVLTVLHQDWLNGKEYKCKVSNKALPAPIEKTISKAKGQPREPQVYTLPPSRDELTKNQVSLTCLVKGFYPSDIAVEWESNGQPENNYKTTPPVLDSDGSFFLYSKLTVDKSRWQQGNVFSCSVMHEALHNHYTQKSLSLSPGK

SEQ ID NO: 150 - protein, 15 aa, Artificial Sequence
  Linker
EPKSCGGGGSGGGGS

SEQ ID NO: 151 - protein, 16 aa, Artificial Sequence
  Linker
EPKSCDGGGGSGGGGS

SEQ ID NO: 152 - protein, 32 aa, Artificial Sequence
  Linker
GGGGSGGGGSGGGGSGGGGSGGGGSGGGGSGG

SEQ ID NO: 153 - protein, 34 aa, Artificial Sequence
  Linker
SGGGSGGGSEGGGSEGGGSEGGGSEGGGSGGGSG

SEQ ID NO: 154 - protein, 19 aa, Artificial Sequence
  Leader 1
MDWTWRILFLVAAATGAHS

SEQ ID NO: 155 - DNA, 57 bp, Artificial Sequence
  Leader 1
atggactggacctggagaatcctcttcttggtggcagcagccacaggagcccactcc

SEQ ID NO: 156 - DNA, 57 bp, Artificial Sequence
  Leader 1
atggactggacctggaggatcctcttcttggtggcagcagccacaggagcccactcc

SEQ ID NO: 157 - protein, 22 aa, Artificial Sequence
  Leader 2
MDMRVPAQLLGLLLLWFPGARC

SEQ ID NO: 158 - DNA, 66 bp, Artificial Sequence
  Leader 2
atggacatgagggtccccgctcagctcctgggcctcctgctgctctggttcccaggtgccaggtgt

SEQ ID NO: 159 - protein, 19 aa, Artificial Sequence
  Leader 3
MGWSCIILFLVATATGVHS

SEQ ID NO: 160 - DNA, 57 bp, Artificial Sequence
  Leader 3
atgggatggagctgtatcatcctcttcttggtagcaacagctaccggtgtgcattcc

SEQ ID NO: 161 - DNA, 57 bp, Artificial Sequence
  Leader 3
atgggctggtcctgcatcatcctgtttctggtggctaccgccactggagtgcattcc

SEQ ID NO: 162 - DNA, 57 bp, Artificial Sequence
  Leader 3
atgggctggtcctgcatcatcctgtttctggtcgccacagccaccggcgtgcactct

SEQ ID NO: 163 - protein, 5 aa, Artificial Sequence
  V9 HCDR1
GYTMN

SEQ ID NO: 164 - DNA, 15 bp, Artificial Sequence
  V9 HCDR1
ggctacaccatgaac

SEQ ID NO: 165 - protein, 17 aa, Artificial Sequence
  V9 HCDR2
LINPYKGVSTYNQKFKD

SEQ ID NO: 166 - DNA, 51 bp, Artificial Sequence
  V9 HCDR2
ctgatcaacccctacaagggcgtgagcacctacaaccagaagttcaaggac

SEQ ID NO: 167 - protein, 13 aa, Artificial Sequence
  V9 HCDR3
SGYYGDSDWYFDV

SEQ ID NO: 168 - DNA, 39 bp, Artificial Sequence
  V9 HCDR3
agcggctactacggcgacagcgactggtacttcgacgtg

SEQ ID NO: 169 - protein, 122 aa, Artificial Sequence [sequence omitted]

SEQ ID NO: 170 - DNA, 366 bp, Artificial Sequence
  V9 VH
gaggtgcagctggtcgagtccggcggaggcctggtgcagcctggcggcagcctgagactgagctgcgccgccagcggctacagcttcaccggctacaccatgaactgggtccggcaggctcctggcaagggcctcgaatgggtggccctgatcaacccctacaagggcgtgagcacctacaaccagaagttcaaggaccggttcaccatcagcgtggacaagagcaagaacaccgcctatctgcagatgaacagcctgcgggccgaggacaccgccgtgtactactgcgccagaagcggctactacggcgacagcgactggtacttcgacgtgtggggccagggcacactggtcaccgtgtccagc

SEQ ID NO: 171 - protein, 11 aa, Artificial Sequence
  V9 LCDR1
RASQDIRNYLN

SEQ ID NO: 172 - DNA, 33 bp, Artificial Sequence
  V9 LCDR1
cgggccagccaggacatcagaaactacctgaac

SEQ ID NO: 173 - protein, 7 aa, Artificial Sequence
  V9 LCDR2
YTSRLES

SEQ ID NO: 174 - DNA, 21 bp, Artificial Sequence
  V9 LCDR2
tacacctctagactggaaagc

SEQ ID NO: 175 - protein, 9 aa, Artificial Sequence
  V9 LCDR3
QQGNTLPWT

SEQ ID NO: 176 - DNA, 27 bp, Artificial Sequence
  V9 LCDR3
cagcagggcaacacactcccctggacc

SEQ ID NO: 177 - protein, 107 aa, Artificial Sequence [sequence omitted]

SEQ ID NO: 178 - DNA, 321 bp, Artificial Sequence
  V9 VL
gacatccagatgacccagagcccctctagcctgagcgccagcgtgggcgacagagtgaccatcacctgtcgggccagccaggacatcagaaactacctgaactggtatcagcagaagcccggcaaggcccccaagctgctgatctactacacctctagactggaaagcggcgtgcccagccggtttagcggcagcggctccggcaccgactacaccctgaccatcagcagcctgcagcccgaggacttcgccacctactactgccagcagggcaacacactcccctggaccttcggccagggcaccaaggtggagatcaag

SEQ ID NO: 179 - protein, 454 aa, Artificial Sequence
  V9(VH-CL)-LC007(VL-CL)
EVQLVESGGGLVQPGGSLRLSCAASGYSFTGYTMNWVRQAPGKGLEWVALINPYKGVSTYNQKFKDRFTISVDKSKNTAYLQMNSLRAEDTAVYYCARSGYYGDSDWYFDVWGQGTLVTVSSASVAAPSVFIFPPSDEQLKSGTASVVCLLNNFYPREAKVQWKVDNALQSGNSQESVTEQDSKDSTYSLSSTLTLSKADYEKHKVYACEVTHQGLSSPVTKSFNRGECDGGGGSGGGGSDIVLTQSPSSLSASLGDRVTISCSASQGIRNYLNWYQQRPDGTVKLLIYYTSSLHSGVPSRFSGSGSGTDYSLTISNLEPEDIATYYCQQYSKLPWTFGGGTKLEIKRTVAAPSVFIFPPSDEQLKSGTASVVCLLNNFYPREAKVQWKVDNALQSGNSQESVTEQDSKDSTYSLSSTLTLSKADYEKHKVYACEVTHQGLSSPVTKSFNRGEC

SEQ ID NO: 180 - DNA, 1362 bp, Artificial Sequence
  V9(VH-CL)-LC007(VL-CL)
gaggtgcagctggtggaatctggcggcggactggtgcagcctggcggatctctgagactgagctgtgccgccagcggctacagcttcaccggctacaccatgaactgggtgcgccaggcccctggcaagggactggaatgggtggccctgatcaacccctacaagggcgtgtccacctacaaccagaagttcaaggaccggttcaccatcagcgtggacaagagcaagaacaccgcctacctgcagatgaacagcctgcgggccgaggacaccgccgtgtactattgtgccagaagcggctactacggcgacagcgactggtacttcgacgtgtggggccagggcacactcgtgaccgtgtcaagcgctagcgtggccgctcccagcgtgttcatcttcccacctagcgacgagcagctgaagtccggcacagcctctgtcgtgtgcctgctgaacaacttctacccccgcgaggccaaggtgcagtggaaggtggacaatgccctgcagagcggcaacagccaggaaagcgtgaccgagcaggacagcaaggatagcacctacagcctgagcagcaccctgaccctgagcaaggccgactacgagaagcacaaggtgtacgcctgcgaagtgacccaccagggcctgtctagccccgtgaccaagagcttcaaccggggcgagtgtgatggcggaggcggatccgggggaggcggctctgatattgtgctgacccagagccccagcagcctgtctgcctctctgggcgacagagtgaccatcagctgtagcgcctctcagggcatccggaactacctgaactggtatcagcagcggcccgacggcaccgtgaagctgctgatctactacaccagctccctgcactccggcgtgcccagcagattttctggcagcggctccggcaccgactactccctgaccatctccaacctggaacccgaggatatcgccacctactactgccagcagtactccaagctgccctggacctttggaggcggcaccaagctggaaatcaagcgtacggtggctgccccctccgtgtttatctttcccccatccgatgaacagctgaaaagcggcaccgccagcgtcgtgtgtctgctgaacaatttttaccctagggaagctaaagtgcagtggaaagtggataacgcactgcagtccggcaactcccaggaatctgtgacagaacaggactctaaggacagcacatactccctgtcctccaccctgacactgtctaaggctgattatgagaaacacaaagtgtatgcttgtgaagtgacacatcagggactgagcagccctgtgacaaagtccttcaacagaggcgagtgc

SEQ ID NO: 181 - protein, 227 aa, Artificial Sequence
  Fc(knob) P329G LALA
DKTHTCPPCPAPEAAGGPSVFLFPPKPKDTLMISRTPEVTCVVVDVSHEDPEVKFNWYVDGVEVHNAKTKPREEQYNSTYRVVSVLTVLHQDWLNGKEYKCKVSNKALGAPIEKTISKAKGQPREPQVYTLPPCRDELTKNQVSLWCLVKGFYPSDIAVEWESNGQPENNYKTTPPVLDSDGSFFLYSKLTVDKSRWQQGNVFSCSVMHEALHNHYTQKSLSLSPGK

SEQ ID NO: 182 - DNA, 681 bp, Artificial Sequence
  Fc(knob) P329G LALA
gacaaaactcacacatgcccaccgtgcccagcacctgaagctgcagggggaccgtcagtcttcctcttccccccaaaacccaaggacaccctcatgatctcccggacccctgaggtcacatgcgtggtggtggacgtgagccacgaagaccctgaggtcaagttcaactggtacgtggacggcgtggaggtgcataatgccaagacaaagccgcgggaggagcagtacaacagcacgtaccgtgtggtcagcgtcctcaccgtcctgcaccaggactggctgaatggcaaggagtacaagtgcaaggtctccaacaaagccctcggcgcccccatcgagaaaaccatctccaaagccaaagggcagccccgagaaccacaggtgtacaccctgcccccatgccgggatgagctgaccaagaaccaggtcagcctgtggtgcctggtcaaaggcttctatcccagcgacatcgccgtggagtgggagagcaatgggcagccggagaacaactacaagaccacgcctcccgtgctggactccgacggctccttcttcctctacagcaagctcaccgtggacaagagcaggtggcagcaggggaacgtcttctcatgctccgtgatgcatgaggctctgcacaaccactacacgcagaagagcctctccctgtctccgggtaaa

SEQ ID NO: 183 - protein, 212 aa, Artificial Sequence
  V9(VL-CH1)
DIQMTQSPSSLSASVGDRVTITCRASQDIRNYLNWYQQKPGKAPKLLIYYTSRLESGVPSRFSGSGSGTDYTLTISSLQPEDFATYYCQQGNTLPWTFGQGTKVEIKSSASTKGPSVFPLAPSSKSTSGGTAALGCLVKDYFPEPVTVSWNSGALTSGVHTFPAVLQSSGLYSLSSVVTVPSSSLGTQTYICNVNHKPSNTKVDKKVEPKSC

SEQ ID NO: 184 - DNA, 636 bp, Artificial Sequence
  V9(VL-CH1)
gatattcagatgacccagagccccagctctctgagcgccagcgtgggcgacagagtgaccatcacctgtcgggccagccaggacatcagaaactacctgaactggtatcagcagaagcccggcaaggcccccaagctgctgatctactacaccagcagactggaaagcggcgtgccctccagattttccggcagcggctccggcaccgactacaccctgaccatcagcagcctgcagcccgaggatttcgccacatattactgccagcagggcaataccctgccctggaccttcggacagggcacaaaagtggaaatcaagagcagcgcttccaccaaaggcccttccgtgtttcctctggctcctagctccaagtccacctctggaggcaccgctgctctcggatgcctcgtgaaggattattttcctgagcctgtgacagtgtcctggaatagcggagcactgacctctggagtgcatactttccccgctgtgctgcagtcctctggactgtacagcctgagcagcgtggtgacagtgcccagcagcagcctgggcacccagacctacatctgcaacgtgaaccacaagcccagcaacaccaaggtggacaagaaggtggaacccaagtcttgt

SEQ ID NO: 185 - protein, 456 aa, Artificial Sequence
  V9(VH-CL)-Fc(knob) P329G LALA
EVQLVESGGGLVQPGGSLRLSCAASGYSFTGYTMNWVRQAPGKGLEWVALINPYKGVSTYNQKFKDRFTISVDKSKNTAYLQMNSLRAEDTAVYYCARSGYYGDSDWYFDVWGQGTLVTVSSASVAAPSVFIFPPSDEQLKSGTASVVCLLNNFYPREAKVQWKVDNALQSGNSQESVTEQDSKDSTYSLSSTLTLSKADYEKHKVYACEVTHQGLSSPVTKSFNRGECDKTHTCPPCPAPEAAGGPSVFLFPPKPKDTLMISRTPEVTCVVVDVSHEDPEVKFNWYVDGVEVHNAKTKPREEQYNSTYRVVSVLTVLHQDWLNGKEYKCKVSNKALGAPIEKTISKAKGQPREPQVYTLPPCRDELTKNQVSLWCLVKGFYPSDIAVEWESNGQPENNYKTTPPVLDSDGSFFLYSKLTVDKSRWQQGNVFSCSVMHEALHNHYTQKSLSLSPGK

SEQ ID NO: 186 - DNA, 1368 bp, Artificial Sequence
  V9(VH-CL)-Fc(knob) P329G LALA
gaggtgcagctggtcgagagcggaggcggcctggtgcagcctggcggcagcctgagactgagctgcgccgccagcggctacagcttcaccggctacaccatgaactgggtccggcaggcacctggcaagggactggaatgggtggccctgatcaacccctacaagggcgtgagcacctacaaccagaagttcaaggaccggttcaccatcagcgtggacaagagcaagaacaccgcctatctgcagatgaacagcctgcgggccgaggacaccgccgtgtactactgcgccagaagcggctactacggcgacagcgactggtacttcgacgtgtggggccagggcaccctcgtgaccgtgtctagcgctagcgtggccgctccctccgtgtttatctttcccccatccgatgaacagctgaaaagcggcaccgcctccgtcgtgtgtctgctgaacaatttttaccctagggaagctaaagtgcagtggaaagtggataacgcactgcagtccggcaactcccaggaatctgtgacagaacaggactccaaggacagcacctactccctgtcctccaccctgacactgtctaaggctgattatgagaaacacaaagtctacgcctgcgaagtcacccatcagggcctgagctcgcccgtcacaaagagcttcaacaggggagagtgtgacaagacccacacctgtcccccttgtcctgcccctgaagctgctggcggcccttctgtgttcctgttccccccaaagcccaaggacaccctgatgatcagccggacccccgaagtgacctgcgtggtggtggatgtgtcccacgaggaccctgaagtgaagttcaattggtacgtggacggcgtggaagtgcacaacgccaagacaaagccgcgggaggagcagtacaacagcacgtaccgtgtggtcagcgtcctcaccgtcctgcaccaggactggctgaatggcaaggagtacaagtgcaaggtctccaacaaagccctcggcgcccccatcgagaaaaccatctccaaagccaaagggcagccccgagaaccacaggtgtacaccctgcccccatgccgggatgagctgaccaagaaccaggtcagcctgtggtgcctggtcaaaggcttctatcccagcgacatcgccgtggagtgggagagcaatgggcagccggagaacaactacaagaccacgcctcccgtgctggactccgacggctccttcttcctctacagcaagctcaccgtggacaagagcaggtggcagcaggggaacgtcttctcatgctccgtgatgcatgaggctctgcacaaccactacacgcagaagagcctctccctgtctccgggtaaa

SEQ ID NO: 187 - protein, 682 aa, Artificial Sequence
  LC007(VH-CH1)-V9(VH-CL)-Fc(knob) P329G LALA
EVQLQESGPGLVKPSQSLSLTCSVTGYSITSGYYWNWIRQFPGNKLEWMGYITYDGSNNYNPSLKNRISITRDTSKNQFFLKLNSVTTEDTATYYCADFDYWGQGTTLTVSSASTKGPSVFPLAPSSKSTSGGTAALGCLVKDYFPEPVTVSWNSGALTSGVHTFPAVLQSSGLYSLSSVVTVPSSSLGTQTYICNVNHKPSNTKVDKKVEPKSCDGGGGSGGGGSEVQLVESGGGLVQPGGSLRLSCAASGYSFTGYTMNWVRQAPGKGLEWVALINPYKGVSTYNQKFKDRFTISVDKSKNTAYLQMNSLRAEDTAVYYCARSGYYGDSDWYFDVWGQGTLVTVSSASVAAPSVFIFPPSDEQLKSGTASVVCLLNNFYPREAKVQWKVDNALQSGNSQESVTEQDSKDSTYSLSSTLTLSKADYEKHKVYACEVTHQGLSSPVTKSFNRGECDKTHTCPPCPAPEAAGGPSVFLFPPKPKDTLMISRTPEVTCVVVDVSHEDPEVKFNWYVDGVEVHNAKTKPREEQYNSTYRVVSVLTVLHQDWLNGKEYKCKVSNKALGAPIEKTISKAKGQPREPQVYTLPPCRDELTKNQVSLWCLVKGFYPSDIAVEWESNGQPENNYKTTPPVLDSDGSFFLYSKLTVDKSRWQQGNVFSCSVMHEALHNHYTQKSLSLSPGK

SEQ ID NO: 188 - DNA, 2046 bp, Artificial Sequence
  LC007(VH-CH1)- V9(VH-CL)-Fc(knob) P329G LALA
gaggtgcagctgcaggaatctggccctggcctggtcaagccaagccagagtctgagcctgacctgcagcgtgaccggctacagcattaccagcggctactactggaactggattcggcagttccccggcaataagctggaatggatgggctacatcacctacgacggcagcaacaactacaaccccagcctgaagaaccggatcagcatcacccgggacaccagcaagaaccagttcttcctgaagctgaacagcgtgaccaccgaggacaccgccacatactattgcgccgacttcgactactggggccagggcaccaccctgaccgtgtccagcgccagcacaaagggccctagcgtgttccctctggcccccagcagcaagagcacaagcggcggaacagccgccctgggctgcctcgtgaaggactacttccccgagcccgtgacagtgtcttggaacagcggagccctgacaagcggcgtgcacaccttccctgccgtgctgcagagcagcggcctgtactccctgagcagcgtggtcaccgtgcctagcagcagcctgggcacccagacctacatctgcaacgtgaaccacaagcccagcaacaccaaagtggacaagaaggtggagcccaagagctgtgatggcggaggagggtccggaggcggaggatccgaagtgcagctggtggaatctggcggaggcctggtgcagcctggcggatctctgagactgagctgtgccgccagcggctacagcttcaccggctacaccatgaactgggtgcgccaggcccctggcaagggactggaatgggtggccctgatcaacccctacaagggcgtgtccacatacaaccagaagttcaaggaccggttcaccatcagcgtggacaagagcaagaacaccgcctacctgcagatgaacagcctgcgggccgaggacaccgccgtgtactattgtgccagaagcggctactacggcgacagcgactggtacttcgacgtgtggggccagggcacactcgtgaccgtgtcaagcgctagcgtggccgctccctccgtgtttatctttcccccatccgatgaacagctgaaaagcggcaccgcctccgtcgtgtgtctgctgaacaatttttaccctagggaagctaaagtgcagtggaaagtggataacgcactgcagtccggcaactcccaggaatctgtgacagaacaggactccaaggacagcacctactccctgtcctccaccctgacactgtctaaggctgattatgagaaacacaaagtctacgcctgcgaagtcacccatcagggcctgagctcgcccgtcacaaagagcttcaacaggggagagtgtgacaagacccacacctgtcccccttgtcctgcccctgaagctgctggcggcccttctgtgttcctgttccccccaaagcccaaggacaccctgatgatcagccggacccccgaagtgacctgcgtggtggtggatgtgtcccacgaggaccctgaagtgaagttcaattggtacgtggacggcgtggaagtgcacaacgccaagacaaagccgcgggaggagcagtacaacagcacgtaccgtgtggtcagcgtcctcaccgtcctgcaccaggactggctgaatggcaaggagtacaagtgcaaggtctccaacaaagccctcggcgcccccatcgagaaaaccatctccaaagccaaagggcagccccgagaaccacaggtgtacaccctgcccccatgccgggatgagctgaccaagaaccaggtcagcctgtggtgcctggtcaaaggcttctatcccagcgacatcgccgtggagtgggagagcaatgggcagccggagaacaactacaagaccacgcctcccgtgctggactccgacggctccttcttcctctacagcaagctcaccgtggacaagagcaggtggcagcaggggaacgtcttctcatgctccgtgatgcatgaggctctgcacaaccactacacgcagaagagcctctccctgtctccgggtaaa

SEQ ID NO: 189 - protein, 214 aa, Artificial Sequence
  M4-3 ML2(VL-CL)
DIQMTQSPSSLSASVGDRVTITCRASQGIRNYLNWYQQKPGKAPKLLIYYTSSLHSGVPSRFSGSGSGTDFTLTISSLQPEDFATYYCQQYSKLPWTFGQGTKVEIKRTVAAPSVFIFPPSDEQLKSGTASVVCLLNNFYPREAKVQWKVDNALQSGNSQESVTEQDSKDSTYSLSSTLTLSKADYEKHKVYACEVTHQGLSSPVTKSFNRGEC

SEQ ID NO: 190 - DNA, 642 bp, Artificial Sequence
  M4-3 ML2(VL-CL)
gacatccagatgacccagagccccagcagcctgagcgccagcgtgggcgacagagtgaccatcacctgccgggccagccagggcatccggaactacctgaactggtatcagcagaagcccggcaaggcccccaagctgctgatctactacaccagcagcctgcacagcggcgtgcctagccggtttagcggcagcggctccggcaccgacttcaccctgaccattagctccctgcagcccgaggacttcgccacctactactgccagcagtacagcaagctgccctggaccttcggccagggaacaaaggtggagatcaagcgtacggtggctgcaccatctgtcttcatcttcccgccatctgatgagcagttgaaatctggaactgcctctgttgtgtgcctgctgaataacttctatcccagagaggccaaagtacagtggaaggtggataacgccctccaatcgggtaactcccaggagagtgtcacagagcaggacagcaaggacagcacctacagcctcagcagcaccctgacgctgagcaaagcagactacgagaaacacaaagtctacgcctgcgaagtcacccatcagggcctgagctcgcccgtcacaaagagcttcaacaggggagagtgt

SEQ ID NO: 191 - protein, 664 aa, Artificial Sequence
  V9(VL-CH1)-M4-3 ML2(VH-CH1)-Fc(knob) P329G LALA
DIQMTQSPSSLSASVGDRVTITCRASQDIRNYLNWYQQKPGKAPKLLIYYTSRLESGVPSRFSGSGSGTDYTLTISSLQPEDFATYYCQQGNTLPWTFGQGTKVEIKSSASTKGPSVFPLAPSSKSTSGGTAALGCLVKDYFPEPVTVSWNSGALTSGVHTFPAVLQSSGLYSLSSVVTVPSSSLGTQTYICNVNHKPSNTKVDKKVEPKSCGGGGSGGGGSQVQLQESGPGLVKPSQTLSLTCTVSGGSITSGYYWNWIRQHPGKGLEWIGYITYDGSNNYNPSLKSRVTISRDTSKNQFSLKLSSVTAADTAVYYCADFDYWGQGTLVTVSSASTKGPSVFPLAPSSKSTSGGTAALGCLVKDYFPEPVTVSWNSGALTSGVHTFPAVLQSSGLYSLSSVVTVPSSSLGTQTYICNVNHKPSNTKVDKKVEPKSCDKTHTCPPCPAPEAAGGPSVFLFPPKPKDTLMISRTPEVTCVVVDVSHEDPEVKFNWYVDGVEVHNAKTKPREEQYNSTYRVVSVLTVLHQDWLNGKEYKCKVSNKALGAPIEKTISKAKGQPREPQVYTLPPCRDELTKNQVSLWCLVKGFYPSDIAVEWESNGQPENNYKTTPPVLDSDGSFFLYSKLTVDKSRWQQGNVFSCSVMHEALHNHYTQKSLSLSPGK

SEQ ID NO: 192 - DNA, 1992 bp, Artificial Sequence
  V9(VL-CH1)-M4-3 ML2(VH-CH1)-Fc(knob) P329G LALA (DNA)
gatatccagatgacccagagccccagctctctgagcgccagcgtgggcgacagagtgaccatcacctgtcgggccagccaggacatcagaaactacctgaactggtatcagcagaagcccggcaaggcccccaagctgctgatctactacaccagcagactggaaagcggcgtgccctccagattttccggcagcggctccggcaccgactacaccctgaccatcagcagcctgcagcccgaggatttcgccacatattactgccagcagggcaataccctgccctggaccttcggacagggcacaaaagtggaaatcaagagcagcgcttccaccaaaggcccttccgtgtttcctctggctcctagctccaagtccacctctggaggcaccgctgctctcggatgcctcgtgaaggattattttcctgagcctgtgacagtgtcctggaatagcggagcactgacctctggagtgcatactttccccgctgtgctgcagtcctctggactgtacagcctgagcagcgtggtgacagtgcccagcagcagcctgggcacccagacctacatctgcaacgtgaaccacaagcccagcaacaccaaggtggacaagaaggtggaacccaagtcttgtggcggaggcggatccggcggagggggatctcaggtgcagctgcaggaaagcggccctggcctggtcaagcccagccagaccctgagcctgacctgcaccgtgtccggcggcagcatcaccagcggctactactggaactggattcggcagcaccccggcaagggcctggaatggatcggctacatcacctacgacggcagcaacaactacaaccccagcctgaagtccagagtgaccatcagccgggacaccagcaagaaccagttcagcctgaagctgtccagcgtgacagccgccgacaccgccgtgtactactgcgccgacttcgactactggggccagggcaccctggtcaccgtgtccagcgctagcaccaagggccccagcgtgttccccctggcacccagcagcaagagcacatctggcggaacagccgctctgggctgtctggtgaaagactacttccccgagcccgtgaccgtgtcttggaactctggcgccctgaccagcggcgtgcacacctttccagccgtgctgcagagcagcggcctgtactccctgtcctccgtggtcaccgtgccctctagctccctgggaacacagacatatatctgtaatgtcaatcacaagccttccaacaccaaagtcgataagaaagtcgagcccaagagctgcgacaaaactcacacatgcccaccgtgcccagcacctgaagctgcagggggaccgtcagtcttcctcttccccccaaaacccaaggacaccctcatgatctcccggacccctgaggtcacatgcgtggtggtggacgtgagccacgaagaccctgaggtcaagttcaactggtacgtggacggcgtggaggtgcataatgccaagacaaagccgcgggaggagcagtacaacagcacgtaccgtgtggtcagcgtcctcaccgtcctgcaccaggactggctgaatggcaaggagtacaagtgcaaggtctccaacaaagccctcggcgcccccatcgagaaaaccatctccaaagccaaagggcagccccgagaaccacaggtgtacaccctgcccccatgccgggatgagctgaccaagaaccaggtcagcctgtggtgcctggtcaaaggcttctatcccagcgacatcgccgtggagtgggagagcaatgggcagccggagaacaactacaagaccacgcctcccgtgctggactccgacggctccttcttcctctacagcaagctcaccgtggacaagagcaggtggcagcaggggaacgtcttctcatgctccgtgatgcatgaggctctgcacaaccactacacgcagaagagcctctccctgtctccgggtaaa

SEQ ID NO: 193 - protein, 442 aa, Artificial Sequence
  M4-3 ML2(VH-CH1)-Fc(hole) P329G LALA
QVQLQESGPGLVKPSQTLSLTCTVSGGSITSGYYWNWIRQHPGKGLEWIGYITYDGSNNYNPSLKSRVTISRDTSKNQFSLKLSSVTAADTAVYYCADFDYWGQGTLVTVSSASTKGPSVFPLAPSSKSTSGGTAALGCLVKDYFPEPVTVSWNSGALTSGVHTFPAVLQSSGLYSLSSVVTVPSSSLGTQTYICNVNHKPSNTKVDKKVEPKSCDKTHTCPPCPAPEAAGGPSVFLFPPKPKDTLMISRTPEVTCVVVDVSHEDPEVKFNWYVDGVEVHNAKTKPREEQYNSTYRVVSVLTVLHQDWLNGKEYKCKVSNKALGAPIEKTISKAKGQPREPQVCTLPPSRDELTKNQVSLSCAVKGFYPSDIAVEWESNGQPENNYKTTPPVLDSDGSFFLVSKLTVDKSRWQQGNVFSCSVMHEALHNHYTQKSLSLSPGK

SEQ ID NO: 194 - DNA, 1326 bp, Artificial Sequence
  M4-3 ML2(VH-CH1)-Fc(hole) P329G LALA
caggtgcagctgcaggaaagcggccctggcctggtcaagcccagccagaccctgagcctgacctgcaccgtgtccggcggcagcatcaccagcggctactactggaactggatccggcagcaccccggcaagggcctggaatggatcggctacatcacctacgacggcagcaacaactacaaccccagcctgaagtccagagtgaccatcagccgggacaccagcaagaaccagttcagcctgaagctgtccagcgtgacagccgccgacaccgccgtgtactactgcgccgacttcgactactggggccagggcaccctggtcaccgtgtccagcgctagcaccaagggcccctccgtgttccccctggcccccagcagcaagagcaccagcggcggcacagccgctctgggctgcctggtcaaggactacttccccgagcccgtgaccgtgtcctggaacagcggagccctgacctccggcgtgcacaccttccccgccgtgctgcagagttctggcctgtatagcctgagcagcgtggtcaccgtgccttctagcagcctgggcacccagacctacatctgcaacgtgaaccacaagcccagcaacaccaaggtggacaagaaggtggagcccaagagctgcgacaaaactcacacatgcccaccgtgcccagcacctgaagctgcagggggaccgtcagtcttcctcttccccccaaaacccaaggacaccctcatgatctcccggacccctgaggtcacatgcgtggtggtggacgtgagccacgaagaccctgaggtcaagttcaactggtacgtggacggcgtggaggtgcataatgccaagacaaagccgcgggaggagcagtacaacagcacgtaccgtgtggtcagcgtcctcaccgtcctgcaccaggactggctgaatggcaaggagtacaagtgcaaggtctccaacaaagccctcggcgcccccatcgagaaaaccatctccaaagccaaagggcagccccgagaaccacaggtgtgcaccctgcccccatcccgggatgagctgaccaagaaccaggtcagcctctcgtgcgcagtcaaaggcttctatcccagcgacatcgccgtggagtgggagagcaatgggcagccggagaacaactacaagaccacgcctcccgtgctggactccgacggctccttcttcctcgtgagcaagctcaccgtggacaagagcaggtggcagcaggggaacgtcttctcatgctccgtgatgcatgaggctctgcacaaccactacacgcagaagagcctctccctgtctccgggtaaa

SEQ ID NO: 195 - protein, 681 aa, Artificial Sequence
  V9(VH-CL)-M4-3 ML2(VH-CH1)-Fc(knob) P329G LALA
EVQLVESGGGLVQPGGSLRLSCAASGYSFTGYTMNWVRQAPGKGLEWVALINPYKGVSTYNQKFKDRFTISVDKSKNTAYLQMNSLRAEDTAVYYCARSGYYGDSDWYFDVWGQGTLVTVSSASVAAPSVFIFPPSDEQLKSGTASVVCLLNNFYPREAKVQWKVDNALQSGNSQESVTEQDSKDSTYSLSSTLTLSKADYEKHKVYACEVTHQGLSSPVTKSFNRGECGGGGSGGGGSQVQLQESGPGLVKPSQTLSLTCTVSGGSITSGYYWNWIRQHPGKGLEWIGYITYDGSNNYNPSLKSRVTISRDTSKNQFSLKLSSVTAADTAVYYCADFDYWGQGTLVTVSSASTKGPSVFPLAPSSKSTSGGTAALGCLVKDYFPEPVTVSWNSGALTSGVHTFPAVLQSSGLYSLSSVVTVPSSSLGTQTYICNVNHKPSNTKVDKKVEPKSCDKTHTCPPCPAPEAAGGPSVFLFPPKPKDTLMISRTPEVTCVVVDVSHEDPEVKFNWYVDGVEVHNAKTKPREEQYNSTYRVVSVLTVLHQDWLNGKEYKCKVSNKALGAPIEKTISKAKGQPREPQVYTLPPCRDELTKNQVSLWCLVKGFYPSDIAVEWESNGQPENNYKTTPPVLDSDGSFFLYSKLTVDKSRWQQGNVFSCSVMHEALHNHYTQKSLSLSPGK

SEQ ID NO: 196 - DNA, 2043 bp, Artificial Sequence
  V9(VH-CL)-M4-3 ML2(VH-CH1)-Fc(knob) P329G LALA (DNA)
gaggtgcagctggtcgagagcggaggcggcctggtgcagcctggcggcagcctgagactgagctgcgccgccagcggctacagcttcaccggctacaccatgaactgggtccggcaggcacctggcaagggactggaatgggtggccctgatcaacccctacaagggcgtgagcacctacaaccagaagttcaaggaccggttcaccatcagcgtggacaagagcaagaacaccgcctatctgcagatgaacagcctgcgggccgaggacaccgccgtgtactactgcgccagaagcggctactacggcgacagcgactggtacttcgacgtgtggggccagggcaccctcgtgaccgtgtctagcgctagcgtggctgcaccatctgtcttcatcttcccgccatctgatgagcagttgaaatctggaactgcctctgttgtgtgcctgctgaataacttctatcccagagaggccaaagtacagtggaaggtggataacgccctccaatcgggtaactcccaggagagtgtcacagagcaggacagcaaggacagcacctacagcctcagcagcaccctgacgctgagcaaagcagactacgagaaacacaaagtctacgcctgcgaagtcacccatcagggcctgagctcgcccgtcacaaagagcttcaacaggggagagtgtggcggaggcggatccggcggagggggatctcaggtgcagctgcaggaaagcggccctggcctggtcaagcccagccagaccctgagcctgacctgcaccgtgtccggcggcagcatcaccagcggctactactggaactggattcggcagcaccccggcaagggcctggaatggatcggctacatcacctacgacggcagcaacaactacaaccccagcctgaagtccagagtgaccatcagccgggacaccagcaagaaccagttcagcctgaagctgtccagcgtgacagccgccgacaccgccgtgtactactgcgccgacttcgactactggggccagggcaccctggtcaccgtgtccagcgctagcaccaagggccccagcgtgttccccctggcacccagcagcaagagcacatctggcggaacagccgctctgggctgtctggtgaaagactacttccccgagcccgtgaccgtgtcttggaactctggcgccctgaccagcggcgtgcacacctttccagccgtgctgcagagcagcggcctgtactccctgtcctccgtggtcaccgtgccctctagctccctgggaacacagacatatatctgtaatgtcaatcacaagccttccaacaccaaagtcgataagaaagtcgagcccaagagctgcgacaaaactcacacatgcccaccgtgcccagcacctgaagctgcagggggaccgtcagtcttcctcttccccccaaaacccaaggacaccctcatgatctcccggacccctgaggtcacatgcgtggtggtggacgtgagccacgaagaccctgaggtcaagttcaactggtacgtggacggcgtggaggtgcataatgccaagacaaagccgcgggaggagcagtacaacagcacgtaccgtgtggtcagcgtcctcaccgtcctgcaccaggactggctgaatggcaaggagtacaagtgcaaggtctccaacaaagccctcggcgcccccatcgagaaaaccatctccaaagccaaagggcagccccgagaaccacaggtgtacaccctgcccccatgccgggatgagctgaccaagaaccaggtcagcctgtggtgcctggtcaaaggcttctatcccagcgacatcgccgtggagtgggagagcaatgggcagccggagaacaactacaagaccacgcctcccgtgctggactccgacggctccttcttcctctacagcaagctcaccgtggacaagagcaggtggcagcaggggaacgtcttctcatgctccgtgatgcatgaggctctgcacaaccactacacgcagaagagcctctccctgtctccgggtaaa

SEQ ID NO: 197 - protein, 690 aa, Artificial Sequence
  CH1A1A(VH-CH1)- V9(VH-CL)-Fc(knob) P329G LALA
QVQLVQSGAEVKKPGASVKVSCKASGYTFTEFGMNWVRQAPGQGLEWMGWINTKTGEATYVEEFKGRVTFTTDTSTSTAYMELRSLRSDDTAVYYCARWDFAYYVEAMDYWGQGTTVTVSSASTKGPSVFPLAPSSKSTSGGTAALGCLVKDYFPEPVTVSWNSGALTSGVHTFPAVLQSSGLYSLSSVVTVPSSSLGTQTYICNVNHKPSNTKVDKKVEPKSCGGGGSGGGGSEVQLVESGGGLVQPGGSLRLSCAASGYSFTGYTMNWVRQAPGKGLEWVALINPYKGVSTYNQKFKDRFTISVDKSKNTAYLQMNSLRAEDTAVYYCARSGYYGDSDWYFDVWGQGTLVTVSSASVAAPSVFIFPPSDEQLKSGTASVVCLLNNFYPREAKVQWKVDNALQSGNSQESVTEQDSKDSTYSLSSTLTLSKADYEKHKVYACEVTHQGLSSPVTKSFNRGECDKTHTCPPCPAPEAAGGPSVFLFPPKPKDTLMISRTPEVTCVVVDVSHEDPEVKFNWYVDGVEVHNAKTKPREEQYNSTYRVVSVLTVLHQDWLNGKEYKCKVSNKALGAPIEKTISKAKGQPREPQVYTLPPCRDELTKNQVSLWCLVKGFYPSDIAVEWESNGQPENNYKTTPPVLDSDGSFFLYSKLTVDKSRWQQGNVFSCSVMHEALHNHYTQKSLSLSPGK

SEQ ID NO: 198 - DNA, 2070 bp, Artificial Sequence
  CH1A1A(VH-CH1)-V9(VH-CL)-Fc(knob) P329G LALA
caggtgcagctggtgcagtctggcgccgaagtgaagaaacctggcgccagcgtgaaggtgtcctgcaaggccagcggctacaccttcaccgagttcggcatgaactgggtccgacaggcccctggacagggcctggaatggatgggctggatcaacaccaagaccggcgaggccacctacgtggaagagttcaagggcagagtgaccttcaccaccgacaccagcaccagcaccgcctacatggaactgcggagcctgagaagcgacgacaccgccgtgtactactgcgccagatgggacttcgcctactatgtggaagccatggactactggggccagggcaccaccgtgaccgtgtctagtgctagcacaaagggccccagcgtgttccctctggcccctagcagcaagagcacatctggcggaacagccgccctgggctgcctggtcaaggactactttcccgagcccgtgacagtgtcctggaactctggcgccctgacaagcggcgtgcacacctttccagccgtgctgcagagcagcggcctgtactctctgagcagcgtggtcaccgtgcctagctctagcctgggcacccagacctacatctgcaacgtgaaccacaagcccagcaacaccaaggtggacaagaaggtggaacccaagagctgcggcggaggcggatccggaggcggaggatccgaagtgcagctggtggaatctggcggaggcctggtgcagcctggcggatctctgagactgagctgtgccgccagcggctacagcttcaccggctacaccatgaactgggtgcgccaggcccctggcaagggactggaatgggtggccctgatcaacccctacaagggcgtgtccacatacaaccagaagttcaaggaccggttcaccatcagcgtggacaagagcaagaacaccgcctacctgcagatgaacagcctgcgggccgaggacaccgccgtgtactattgtgccagaagcggctactacggcgacagcgactggtacttcgacgtgtggggccagggcacactcgtgaccgtgtcaagcgctagcgtggccgctccctccgtgtttatctttcccccatccgatgaacagctgaaaagcggcaccgcctccgtcgtgtgtctgctgaacaatttttaccctagggaagctaaagtgcagtggaaagtggataacgcactgcagtccggcaactcccaggaatctgtgacagaacaggactccaaggacagcacctactccctgtcctccaccctgacactgtctaaggctgattatgagaaacacaaagtctacgcctgcgaagtcacccatcagggcctgagctcgcccgtcacaaagagcttcaacaggggagagtgtgacaagacccacacctgtcccccttgtcctgcccctgaagctgctggcggcccttctgtgttcctgttccccccaaagcccaaggacaccctgatgatcagccggacccccgaagtgacctgcgtggtggtggatgtgtcccacgaggaccctgaagtgaagttcaattggtacgtggacggcgtggaagtgcacaacgccaagacaaagccgcgggaggagcagtacaacagcacgtaccgtgtggtcagcgtcctcaccgtcctgcaccaggactggctgaatggcaaggagtacaagtgcaaggtctccaacaaagccctcggcgcccccatcgagaaaaccatctccaaagccaaagggcagccccgagaaccacaggtgtacaccctgcccccatgccgggatgagctgaccaagaaccaggtcagcctgtggtgcctggtcaaaggcttctatcccagcgacatcgccgtggagtgggagagcaatgggcagccggagaacaactacaagaccacgcctcccgtgctggactccgacggctccttcttcctctacagcaagctcaccgtggacaagagcaggtggcagcaggggaacgtcttctcatgctccgtgatgcatgaggctctgcacaaccactacacgcagaagagcctctccctgtctccgggtaaa

SEQ ID NO: 199 - protein, 214 aa, Artificial Sequence
  H2C(VL-CH1)
QTVVTQEPSLTVSPGGTVTLTCGSSTGAVTSGYYPNWVQQKPGQAPRGLIGGTKFLAPGTPARFSGSLLGGKAALTLSGVQPEDEAEYYCALWYSNRWVFGGGTKLTVLSSASTKGPSVFPLAPSSKSTSGGTAALGCLVKDYFPEPVTVSWNSGALTSGVHTFPAVLQSSGLYSLSSVVTVPSSSLGTQTYICNVNHKPSNTKVDKKVEPKSC

SEQ ID NO: 200 - DNA, 642 bp, Artificial Sequence
  H2C(VL-CH1)
cagaccgtggtgacacaggaacccagcctgaccgtctcccctggcggcaccgtgaccctgacctgtggaagcagcacaggcgccgtgaccagcggctactaccccaactgggtgcagcagaagcccggccaggcccctagaggactgatcggcggcaccaagtttctggcccctggcacccccgccagattctctggctctctgctgggcggcaaggccgccctgacactgtctggcgtgcagcctgaggacgaggccgagtactactgcgccctgtggtacagcaacagatgggtgttcggcggaggcaccaagctgaccgtgctgagcagcgcttccaccaaaggcccttccgtgtttcctctggctcctagctccaagtccacctctggaggcaccgctgctctcggatgcctcgtgaaggattattttcctgagcctgtgacagtgtcctggaatagcggagcactgacctctggagtgcatactttccccgctgtgctgcagtcctctggactgtacagcctgagcagcgtggtgacagtgcccagcagcagcctgggcacccagacctacatctgcaacgtgaaccacaagcccagcaacaccaaggtggacaagaaggtggaacccaagtcttgt

SEQ ID NO: 201 - protein, 684 aa, Artificial Sequence
  H2C(VH-CL)-M4-3 ML2(VH-CH1)-Fc(knob) P329G LALA
EVQLVESGGGLVQPGGSLKLSCAASGFTFNKYAMNWVRQAPGKGLEWVARIRSKYNNYATYYADSVKDRFTISRDDSKNTAYLQMNNLKTEDTAVYYCVRHGNFGNSYISYWAYWGQGTLVTVSSASVAAPSVFIFPPSDEQLKSGTASVVCLLNNFYPREAKVQWKVDNALQSGNSQESVTEQDSKDSTYSLSSTLTLSKADYEKHKVYACEVTHQGLSSPVTKSFNRGECGGGGSGGGGSQVQLQESGPGLVKPSQTLSLTCTVSGGSITSGYYWNWIRQHPGKGLEWIGYITYDGSNNYNPSLKSRVTISRDTSKNQFSLKLSSVTAADTAVYYCADFDYWGQGTLVTVSSASTKGPSVFPLAPSSKSTSGGTAALGCLVKDYFPEPVTVSWNSGALTSGVHTFPAVLQSSGLYSLSSVVTVPSSSLGTQTYICNVNHKPSNTKVDKKVEPKSCDKTHTCPPCPAPEAAGGPSVFLFPPKPKDTLMISRTPEVTCVVVDVSHEDPEVKFNWYVDGVEVHNAKTKPREEQYNSTYRVVSVLTVLHQDWLNGKEYKCKVSNKALGAPIEKTISKAKGQPREPQVYTLPPCRDELTKNQVSLWCLVKGFYPSDIAVEWESNGQPENNYKTTPPVLDSDGSFFLYSKLTVDKSRWQQGNVFSCSVMHEALHNHYTQKSLSLSPGK

SEQ ID NO: 202 - DNA, 2052 bp, Artificial Sequence
  H2C(VH-CL)-M4-3 ML2(VH-CH1)-Fc(knob) P329G LALA
gaggtgcagctggtggaaagcggcggaggactggtgcagcctggcggaagcctgaagctgtcttgcgccgccagcggcttcaccttcaacaaatacgccatgaactgggtgcgccaggcccctggcaagggactggaatgggtggcccggatcagaagcaagtacaacaactacgccacctactacgccgacagcgtgaaggaccggttcaccatcagccgggacgacagcaagaacaccgcctacctgcagatgaacaacctgaaaaccgaggacaccgccgtgtactactgcgtgcggcacggcaacttcggcaacagctacatcagctactgggcctactggggacagggcaccctggtgacagtgtccagcgctagcgtggctgcaccatctgtcttcatcttcccgccatctgatgagcagttgaaatctggaactgcctctgttgtgtgcctgctgaataacttctatcccagagaggccaaagtacagtggaaggtggataacgccctccaatcgggtaactcccaggagagtgtcacagagcaggacagcaaggacagcacctacagcctcagcagcaccctgacgctgagcaaagcagactacgagaaacacaaagtctacgcctgcgaagtcacccatcagggcctgagctcgcccgtcacaaagagcttcaacaggggagagtgtggcggaggcggatccggcggagggggatctcaggtgcagctgcaggaaagcggccctggcctggtcaagcccagccagaccctgagcctgacctgcaccgtgtccggcggcagcatcaccagcggctactactggaactggattcggcagcaccccggcaagggcctggaatggatcggctacatcacctacgacggcagcaacaactacaaccccagcctgaagtccagagtgaccatcagccgggacaccagcaagaaccagttcagcctgaagctgtccagcgtgacagccgccgacaccgccgtgtactactgcgccgacttcgactactggggccagggcaccctggtcaccgtgtccagcgctagcaccaagggccccagcgtgttccccctggcacccagcagcaagagcacatctggcggaacagccgctctgggctgtctggtgaaagactacttccccgagcccgtgaccgtgtcttggaactctggcgccctgaccagcggcgtgcacacctttccagccgtgctgcagagcagcggcctgtactccctgtcctccgtggtcaccgtgccctctagctccctgggaacacagacatatatctgtaatgtcaatcacaagccttccaacaccaaagtcgataagaaagtcgagcccaagagctgcgacaaaactcacacatgcccaccgtgcccagcacctgaagctgcagggggaccgtcagtcttcctcttccccccaaaacccaaggacaccctcatgatctcccggacccctgaggtcacatgcgtggtggtggacgtgagccacgaagaccctgaggtcaagttcaactggtacgtggacggcgtggaggtgcataatgccaagacaaagccgcgggaggagcagtacaacagcacgtaccgtgtggtcagcgtcctcaccgtcctgcaccaggactggctgaatggcaaggagtacaagtgcaaggtctccaacaaagccctcggcgcccccatcgagaaaaccatctccaaagccaaagggcagccccgagaaccacaggtgtacaccctgcccccatgccgggatgagctgaccaagaaccaggtcagcctgtggtgcctggtcaaaggcttctatcccagcgacatcgccgtggagtgggagagcaatgggcagccggagaacaactacaagaccacgcctcccgtgctggactccgacggctccttcttcctctacagcaagctcaccgtggacaagagcaggtggcagcaggggaacgtcttctcatgctccgtgatgcatgaggctctgcacaaccactacacgcagaagagcctctccctgtctccgggtaaa

SEQ ID NO: 203 - protein, 212 aa, Artificial Sequence
  431/26(VL-CL)
DIQMTQSPSSLSASVGDRVTITCSTSSSVSYMHWYQQKPGKAPKLLIYSTSNLASGVPSRFSGSGSGTDFTFTISSLQPEDIATYYCHQWSSYPTFGQGTKVEIKRTVAAPSVFIFPPSDEQLKSGTASVVCLLNNFYPREAKVQWKVDNALQSGNSQESVTEQDSKDSTYSLSSTLTLSKADYEKHKVYACEVTHQGLSSPVTKSFNRGEC

SEQ ID NO: 204 - DNA, 636 bp, Artificial Sequence
  431/26(VL-CL)
gacatccagatgacccagagccccagcagcctgtctgccagcgtgggcgacagagtgaccatcacctgtagcaccagcagcagcgtgtcctacatgcactggtatcagcagaagcccggcaaggcccccaagctgctgatctacagcacctccaatctggccagcggcgtgcccagcagattttctggcagcggctccggcaccgacttcaccttcaccatcagctccctgcagcccgaggatatcgccacctactactgccaccagtggtccagctaccccacctttggccagggcaccaaggtggaaatcaagcgtacggtggctgcaccatctgtcttcatcttcccgccatctgatgagcagttgaaatctggaactgcctctgttgtgtgcctgctgaataacttctatcccagagaggccaaagtacagtggaaggtggataacgccctccaatcgggtaactcccaggagagtgtcacagagcaggacagcaaggacagcacctacagcctcagcagcaccctgacgctgagcaaagcagactacgagaaacacaaagtctacgcctgcgaagtcacccatcagggcctgagctcgcccgtcacaaagagcttcaacaggggagagtgt

SEQ ID NO: 205 - protein, 689 aa, Artificial Sequence
  431/26(VH-CH1)-V9(VH-CL)-Fc(knob) P329G LALA
QVQLQESGPGLVRPSQTLSLTCTVSGFTISSGYSWHWVRQPPGRGLEWIGYIQYSGITNYNPSLKSRVTMLVDTSKNQFSLRLSSVTAADTAVYYCAREDYDYHWYFDVWGQGSLVTVSSASTKGPSVFPLAPSSKSTSGGTAALGCLVKDYFPEPVTVSWNSGALTSGVHTFPAVLQSSGLYSLSSVVTVPSSSLGTQTYICNVNHKPSNTKVDKKVEPKSCGGGGSGGGGSEVQLVESGGGLVQPGGSLRLSCAASGYSFTGYTMNWVRQAPGKGLEWVALINPYKGVSTYNQKFKDRFTISVDKSKNTAYLQMNSLRAEDTAVYYCARSGYYGDSDWYFDVWGQGTLVTVSSASVAAPSVFIFPPSDEQLKSGTASVVCLLNNFYPREAKVQWKVDNALQSGNSQESVTEQDSKDSTYSLSSTLTLSKADYEKHKVYACEVTHQGLSSPVTKSFNRGECDKTHTCPPCPAPEAAGGPSVFLFPPKPKDTLMISRTPEVTCVVVDVSHEDPEVKFNWYVDGVEVHNAKTKPREEQYNSTYRVVSVLTVLHQDWLNGKEYKCKVSNKALGAPIEKTISKAKGQPREPQVYTLPPCRDELTKNQVSLWCLVKGFYPSDIAVEWESNGQPENNYKTTPPVLDSDGSFFLYSKLTVDKSRWQQGNVFSCSVMHEALHNHYTQKSLSLSPGK

SEQ ID NO: 206 - DNA, 2067 bp, Artificial Sequence
  431/26(VH-CH1)-V9(VH-CL)-Fc(knob) P329G LALA
caggtgcagctgcaggaatctggccctggactcgtgcggcctagccagacactgagcctgacctgtaccgtgtccggcttcaccatcagcagcggctacagctggcattgggtgcgccagccacctggcagaggcctggaatggatcggctacatccagtacagcggcatcaccaactacaaccccagcctgaagtccagagtgaccatgctggtggacacctccaagaaccagttcagcctgcggctgagcagcgtgacagccgccgatacagccgtgtactactgcgccagagaggactacgactaccactggtacttcgacgtgtggggccagggctctctcgtgaccgtgtcaagcgctagcacaaagggccccagcgtgttccctctggcccctagcagcaagagcacatctggcggaacagccgccctgggctgcctggtcaaggactactttcccgagcccgtgacagtgtcctggaactctggcgccctgacaagcggcgtgcacacctttccagccgtgctgcagagcagcggcctgtactctctgagcagcgtggtcaccgtgcctagctctagcctgggcacccagacctacatctgcaacgtgaaccacaagcccagcaacaccaaggtggacaagaaggtggaacccaagagctgcggcggaggcggatccggaggcggaggatccgaagtgcagctggtggaatctggcggaggcctggtgcagcctggcggatctctgagactgagctgtgccgccagcggctacagcttcaccggctacaccatgaactgggtgcgccaggcccctggcaagggactggaatgggtggccctgatcaacccctacaagggcgtgtccacatacaaccagaagttcaaggaccggttcaccatcagcgtggacaagagcaagaacaccgcctacctgcagatgaacagcctgcgggccgaggacaccgccgtgtactattgtgccagaagcggctactacggcgacagcgactggtacttcgacgtgtggggccagggcacactcgtgaccgtgtcaagcgctagcgtggccgctccctccgtgtttatctttcccccatccgatgaacagctgaaaagcggcaccgcctccgtcgtgtgtctgctgaacaatttttaccctagggaagctaaagtgcagtggaaagtggataacgcactgcagtccggcaactcccaggaatctgtgacagaacaggactccaaggacagcacctactccctgtcctccaccctgacactgtctaaggctgattatgagaaacacaaagtctacgcctgcgaagtcacccatcagggcctgagctcgcccgtcacaaagagcttcaacaggggagagtgtgacaagacccacacctgtcccccttgtcctgcccctgaagctgctggcggcccttctgtgttcctgttccccccaaagcccaaggacaccctgatgatcagccggacccccgaagtgacctgcgtggtggtggatgtgtcccacgaggaccctgaagtgaagttcaattggtacgtggacggcgtggaagtgcacaacgccaagacaaagccgcgggaggagcagtacaacagcacgtaccgtgtggtcagcgtcctcaccgtcctgcaccaggactggctgaatggcaaggagtacaagtgcaaggtctccaacaaagccctcggcgcccccatcgagaaaaccatctccaaagccaaagggcagccccgagaaccacaggtgtacaccctgcccccatgccgggatgagctgaccaagaaccaggtcagcctgtggtgcctggtcaaaggcttctatcccagcgacatcgccgtggagtgggagagcaatgggcagccggagaacaactacaagaccacgcctcccgtgctggactccgacggctccttcttcctctacagcaagctcaccgtggacaagagcaggtggcagcaggggaacgtcttctcatgctccgtgatgcatgaggctctgcacaaccactacacgcagaagagcctctccctgtctccgggtaaa

SEQ ID NO: 207 - protein, 450 aa, Artificial Sequence
  431/26(VH-CH1)-Fc(hole) P329G LALA
QVQLQESGPGLVRPSQTLSLTCTVSGFTISSGYSWHWVRQPPGRGLEWIGYIQYSGITNYNPSLKSRVTMLVDTSKNQFSLRLSSVTAADTAVYYCAREDYDYHWYFDVWGQGSLVTVSSASTKGPSVFPLAPSSKSTSGGTAALGCLVKDYFPEPVTVSWNSGALTSGVHTFPAVLQSSGLYSLSSVVTVPSSSLGTQTYICNVNHKPSNTKVDKKVEPKSCDKTHTCPPCPAPEAAGGPSVFLFPPKPKDTLMISRTPEVTCVVVDVSHEDPEVKFNWYVDGVEVHNAKTKPREEQYNSTYRVVSVLTVLHQDWLNGKEYKCKVSNKALGAPIEKTISKAKGQPREPQVCTLPPSRDELTKNQVSLSCAVKGFYPSDIAVEWESNGQPENNYKTTPPVLDSDGSFFLVSKLTVDKSRWQQGNVFSCSVMHEALHNHYTQKSLSLSPGK

SEQ ID NO: 208 - DNA, 1350 bp, Artificial Sequence
  431/26(VH-CH1)-Fc(hole) P329G LALA
caggtgcagctgcaggaatctggccctggactcgtgcggcctagccagacactgagcctgacctgtaccgtgtccggcttcaccatcagcagcggctacagctggcattgggtgcgccagccacctggcagaggcctggaatggatcggctacatccagtacagcggcatcaccaactacaaccccagcctgaagtccagagtgaccatgctggtggacacctccaagaaccagttcagcctgcggctgagcagcgtgacagccgccgatacagccgtgtactactgcgccagagaggactacgactaccactggtacttcgacgtgtggggccagggctctctcgtgaccgtgtcaagcgctagcaccaagggcccctccgtgttccccctggcccccagcagcaagagcaccagcggcggcacagccgctctgggctgcctggtcaaggactacttccccgagcccgtgaccgtgtcctggaacagcggagccctgacctccggcgtgcacaccttccccgccgtgctgcagagttctggcctgtatagcctgagcagcgtggtcaccgtgccttctagcagcctgggcacccagacctacatctgcaacgtgaaccacaagcccagcaacaccaaggtggacaagaaggtggagcccaagagctgcgacaaaactcacacatgcccaccgtgcccagcacctgaagctgcagggggaccgtcagtcttcctcttccccccaaaacccaaggacaccctcatgatctcccggacccctgaggtcacatgcgtggtggtggacgtgagccacgaagaccctgaggtcaagttcaactggtacgtggacggcgtggaggtgcataatgccaagacaaagccgcgggaggagcagtacaacagcacgtaccgtgtggtcagcgtcctcaccgtcctgcaccaggactggctgaatggcaaggagtacaagtgcaaggtctccaacaaagccctcggcgcccccatcgagaaaaccatctccaaagccaaagggcagccccgagaaccacaggtgtgcaccctgcccccatcccgggatgagctgaccaagaaccaggtcagcctctcgtgcgcagtcaaaggcttctatcccagcgacatcgccgtggagtgggagagcaatgggcagccggagaacaactacaagaccacgcctcccgtgctggactccgacggctccttcttcctcgtgagcaagctcaccgtggacaagagcaggtggcagcaggggaacgtcttctcatgctccgtgatgcatgaggctctgcacaaccactacacgcagaagagcctctccctgtctccgggtaaa

SEQ ID NO: 209 - protein, 464 aa, Artificial Sequence
  CH1A1A(VL-CL)-V9 (VH-CL)
DIQMTQSPSSLSASVGDRVTITCKASAAVGTYVAWYQQKPGKAPKLLIYSASYRKRGVPSRFSGSGSGTDFTLTISSLQPEDFATYYCHQYYTYPLFTFGQGTKLEIKRTVAAPSVFIFPPSDEQLKSGTASVVCLLNNFYPREAKVQWKVDNALQSGNSQESVTEQDSKDSTYSLSSTLTLSKADYEKHKVYACEVTHQGLSSPVTKSFNRGECGGGGSGGGGSGGGGSGGGGSEVQLVESGGGLVQPGGSLRLSCAASGYSFTGYTMNWVRQAPGKGLEWVALINPYKGVSTYNQKFKDRFTISVDKSKNTAYLQMNSLRAEDTAVYYCARSGYYGDSDWYFDVWGQGTLVTVSSASVAAPSVFIFPPSDEQLKSGTASVVCLLNNFYPREAKVQWKVDNALQSGNSQESVTEQDSKDSTYSLSSTLTLSKADYEKHKVYACEVTHQGLSSPVTKSFNRGEC

SEQ ID NO: 210 - DNA, 1392 bp, Artificial Sequence
  CH1A1A(VL-CL)-V9 (VH-CL)
gatatccagatgacccagagccccagcagcctgtctgccagcgtgggcgacagagtgaccatcacatgcaaggcctctgccgccgtgggcacatacgtggcctggtatcagcagaagcccggcaaggcccccaagctgctgatctacagcgccagctaccggaagagaggcgtgcccagcagattttccggcagcggctctggcaccgacttcaccctgaccatcagctccctgcagcccgaggacttcgccacctactactgccaccagtactacacctaccccctgttcaccttcggccagggcaccaagctcgagatcaagcgtacggtggccgctcccagcgtgttcatcttcccacctagcgacgagcagctgaagtccggcacagcctctgtcgtgtgcctgctgaacaacttctacccccgcgaggccaaggtgcagtggaaggtggacaatgccctgcagagcggcaacagccaggaaagcgtgaccgagcaggacagcaaggactccacctacagcctgagcagcaccctgacactgagcaaggccgactacgagaagcacaaggtgtacgcctgcgaagtgacccaccagggcctgtctagccccgtgaccaagagcttcaaccggggcgaatgtggcggcggaggatccggcggaggcggctccggaggcggaggaagtggcggagggggatctgaagtgcagctggtggaatctggcggaggcctggtgcagcctggcggatctctgagactgagctgtgccgccagcggctacagcttcaccggctacaccatgaactgggtgcgccaggcccctggcaagggactggaatgggtggccctgatcaacccctacaagggcgtgtccacatacaaccagaagttcaaggaccggttcaccatcagcgtggacaagagcaagaacaccgcctacctgcagatgaacagcctgcgggccgaggacaccgccgtgtactactgtgccagaagcggctactacggcgacagcgactggtacttcgacgtgtggggccagggaaccctcgtgaccgtgtcaagcgctagcgtggccgcaccctctgtgtttatctttccaccctctgacgaacagctgaaaagcggcaccgccagcgtcgtgtgtctgctgaacaatttttaccctagggaagctaaagtgcagtggaaagtggataacgcactgcagtccggcaactcccaggaatctgtgacagaacaggactccaaggacagcacatactccctgtccagcacactgaccctgtctaaggccgattatgagaaacacaaagtgtatgcttgtgaagtgacacatcagggactgagcagccctgtgacaaagtccttcaacagaggcgagtgt

SEQ ID NO: 211 - protein, 451 aa, Artificial Sequence
  CH1A1A(VH-CH1)-Fc(knob) P329G LALA
QVQLVQSGAEVKKPGASVKVSCKASGYTFTEFGMNWVRQAPGQGLEWMGWINTKTGEATYVEEFKGRVTFTTDTSTSTAYMELRSLRSDDTAVYYCARWDFAYYVEAMDYWGQGTTVTVSSASTKGPSVFPLAPSSKSTSGGTAALGCLVKDYFPEPVTVSWNSGALTSGVHTFPAVLQSSGLYSLSSVVTVPSSSLGTQTYICNVNHKPSNTKVDKKVEPKSCDKTHTCPPCPAPEAAGGPSVFLFPPKPKDTLMISRTPEVTCVVVDVSHEDPEVKFNWYVDGVEVHNAKTKPREEQYNSTYRVVSVLTVLHQDWLNGKEYKCKVSNKALGAPIEKTISKAKGQPREPQVYTLPPCRDELTKNQVSLWCLVKGFYPSDIAVEWESNGQPENNYKTTPPVLDSDGSFFLYSKLTVDKSRWQQGNVFSCSVMHEALHNHYTQKSLSLSPGK

SEQ ID NO: 212 - DNA, 1353 bp, Artificial Sequence
  CH1A1A(VH-CH1)-Fc(knob) P329G LALA
caggtgcagctggtgcagtctggcgccgaagtgaagaaacctggagctagtgtgaaggtgtcctgcaaggccagcggctacaccttcaccgagttcggcatgaactgggtccgacaggctccaggccagggcctcgaatggatgggctggatcaacaccaagaccggcgaggccacctacgtggaagagttcaagggcagagtgaccttcaccacggacaccagcaccagcaccgcctacatggaactgcggagcctgagaagcgacgacaccgccgtgtactactgcgccagatgggacttcgcctattacgtggaagccatggactactggggccagggcaccaccgtgaccgtgtctagcgctagcaccaagggcccatcggtcttccccctggcaccctcctccaagagcacctctgggggcacagcggccctgggctgcctggtcaaggactacttccccgaaccggtgacggtgtcgtggaactcaggcgccctgaccagcggcgtgcacaccttcccggctgtcctacagtcctcaggactctactccctcagcagcgtggtgaccgtgccctccagcagcttgggcacccagacctacatctgcaacgtgaatcacaagcccagcaacaccaaggtggacaagaaagttgagcccaaatcttgtgacaaaactcacacatgcccaccgtgcccagcacctgaagctgcagggggaccgtcagtcttcctcttccccccaaaacccaaggacaccctcatgatctcccggacccctgaggtcacatgcgtggtggtggacgtgagccacgaagaccctgaggtcaagttcaactggtacgtggacggcgtggaggtgcataatgccaagacaaagccgcgggaggagcagtacaacagcacgtaccgtgtggtcagcgtcctcaccgtcctgcaccaggactggctgaatggcaaggagtacaagtgcaaggtctccaacaaagccctcggcgcccccatcgagaaaaccatctccaaagccaaagggcagccccgagaaccacaggtgtacaccctgcccccatgccgggatgagctgaccaagaaccaggtcagcctgtggtgcctggtcaaaggcttctatcccagcgacatcgccgtggagtgggagagcaatgggcagccggagaacaactacaagaccacgcctcccgtgctggactccgacggctccttcttcctctacagcaagctcaccgtggacaagagcaggtggcagcaggggaacgtcttctcatgctccgtgatgcatgaggctctgcacaaccactacacgcagaagagcctctccctgtctccgggtaaa

SEQ ID NO: 213 - protein, 227 aa, Artificial Sequence
  Fc(hole) P329G LALA
DKTHTCPPCPAPEAAGGPSVFLFPPKPKDTLMISRTPEVTCVVVDVSHEDPEVKFNWYVDGVEVHNAKTKPREEQYNSTYRVVSVLTVLHQDWLNGKEYKCKVSNKALGAPIEKTISKAKGQPREPQVCTLPPSRDELTKNQVSLSCAVKGFYPSDIAVEWESNGQPENNYKTTPPVLDSDGSFFLVSKLTVDKSRWQQGNVFSCSVMHEALHNHYTQKSLSLSPGK

SEQ ID NO: 214 - DNA, 681 bp, Artificial Sequence
  Fc(hole) P329G LALA
gacaaaactcacacatgcccaccgtgcccagcacctgaagctgcagggggaccgtcagtcttcctcttccccccaaaacccaaggacaccctcatgatctcccggacccctgaggtcacatgcgtggtggtggacgtgagccacgaagaccctgaggtcaagttcaactggtacgtggacggcgtggaggtgcataatgccaagacaaagccgcgggaggagcagtacaacagcacgtaccgtgtggtcagcgtcctcaccgtcctgcaccaggactggctgaatggcaaggagtacaagtgcaaggtctccaacaaagccctcggcgcccccatcgagaaaaccatctccaaagccaaagggcagccccgagaaccacaggtgtgcaccctgcccccatcccgggatgagctgaccaagaaccaggtcagcctctcgtgcgcagtcaaaggcttctatcccagcgacatcgccgtggagtgggagagcaatgggcagccggagaacaactacaagaccacgcctcccgtgctggactccgacggctccttcttcctcgtgagcaagctcaccgtggacaagagcaggtggcagcaggggaacgtcttctcatgctccgtgatgcatgaggctctgcacaaccactacacgcagaagagcctctccctgtctccgggtaaa

SEQ ID NO: 215 - protein, 214 aa, Artificial Sequence
  CH2527(VL-CH1)
QAVVTQESALTTSPGETVTLTCRSSTGAVTTSNYANWVQEKPDHLFTGLIGGTNKRAPGVPARFSGSLIGDKAALTITGAQTEDEAIYFCALWYSNLWVFGGGTKLTVLSSASTKGPSVFPLAPSSKSTSGGTAALGCLVKDYFPEPVTVSWNSGALTSGVHTFPAVLQSSGLYSLSSVVTVPSSSLGTQTYICNVNHKPSNTKVDKKVEPKSC

SEQ ID NO: 216 - DNA, 642 bp, Artificial Sequence
  CH2527(VL-CH1)
caggccgtcgtgacccaggaaagcgccctgacaacaagccctggcgagacagtgaccctgacctgcagatctagcacaggcgccgtgaccaccagcaactacgccaactgggtgcaggaaaagcccgaccacctgttcaccggcctgatcggcggcaccaacaaaagggctccaggcgtgccagccagattcagcggcagcctgattggcgataaggccgccctgaccatcactggcgcccagacagaggacgaggccatctacttttgcgccctgtggtacagcaacctgtgggtgttcggcggaggcaccaagctgacagtgctgagcagcgcttccaccaaaggcccttccgtgtttcctctggctcctagctccaagtccacctctggaggcaccgctgctctcggatgcctcgtgaaggattattttcctgagcctgtgacagtgtcctggaatagcggagcactgacctctggagtgcatactttccccgctgtgctgcagtcctctggactgtacagcctgagcagcgtggtgacagtgcccagcagcagcctgggcacccagacctacatctgcaacgtgaaccacaagcccagcaacaccaaggtggacaagaaggtggaacccaagtcttgt

SEQ ID NO: 217 - protein, 684 aa, Artificial Sequence
  CH2527(VH-CL)-LC007(VH-CH1)-Fc(knob) P329G LALA
EVQLVESGGGLVQPKGSLKLSCAASGFTFNTYAMNWVRQAPGKGLEWVARIRSKYNNYATYYADSVKDRFTISRDDSQSILYLQMNNLKTEDTAMYYCVRHGNFGNSYVSWFAYWGQGTLVTVSAASVAAPSVFIFPPSDEQLKSGTASVVCLLNNFYPREAKVQWKVDNALQSGNSQESVTEQDSKDSTYSLSSTLTLSKADYEKHKVYACEVTHQGLSSPVTKSFNRGECGGGGSGGGGSEVQLQESGPGLVKPSQSLSLTCSVTGYSITSGYYWNWIRQFPGNKLEWMGYITYDGSNNYNPSLKNRISITRDTSKNQFFLKLNSVTTEDTATYYCADFDYWGQGTTLTVSSASTKGPSVFPLAPSSKSTSGGTAALGCLVKDYFPEPVTVSWNSGALTSGVHTFPAVLQSSGLYSLSSVVTVPSSSLGTQTYICNVNHKPSNTKVDKKVEPKSCDKTHTCPPCPAPEAAGGPSVFLFPPKPKDTLMISRTPEVTCVVVDVSHEDPEVKFNWYVDGVEVHNAKTKPREEQYNSTYRVVSVLTVLHQDWLNGKEYKCKVSNKALGAPIEKTISKAKGQPREPQVYTLPPCRDELTKNQVSLWCLVKGFYPSDIAVEWESNGQPENNYKTTPPVLDSDGSFFLYSKLTVDKSRWQQGNVFSCSVMHEALHNHYTQKSLSLSPGK

SEQ ID NO: 218 - DNA, 2052 bp, Artificial Sequence
  CH2527(VH-CL)-LC007(VH-CH1)-Fc(knob) P329G LALA
gaagtgcagctggtggaaagcggcggaggcctggtgcagcctaagggctctctgaagctgagctgtgccgccagcggcttcaccttcaacacctacgccatgaactgggtgcgccaggcccctggcaaaggcctggaatgggtggcccggatcagaagcaagtacaacaattacgccacctactacgccgacagcgtgaaggaccggttcaccatcagccgggacgacagccagagcatcctgtacctgcagatgaacaacctgaaaaccgaggacaccgccatgtactactgcgtgcggcacggcaacttcggcaacagctatgtgtcttggtttgcctactggggccagggcaccctcgtgacagtgtctgctgctagcgtggctgcaccatctgtcttcatcttcccgccatctgatgagcagttgaaatctggaactgcctctgttgtgtgcctgctgaataacttctatcccagagaggccaaagtacagtggaaggtggataacgccctccaatcgggtaactcccaggagagtgtcacagagcaggacagcaaggacagcacctacagcctcagcagcaccctgacgctgagcaaagcagactacgagaaacacaaagtctacgcctgcgaagtcacccatcagggcctgagctcgcccgtcacaaagagcttcaacaggggagagtgtggcggaggcggatccggcggagggggatctgaggtccagctgcaggagtcaggacctggcctcgtgaaaccttctcagtctctgtctctcacctgctctgtcactggctactccatcaccagtggttattactggaactggattcggcagtttccaggaaacaagctggaatggatgggctacataacctacgacggtagcaataactacaacccatctctcaaaaatcgaatctccattactcgtgacacatctaagaaccagtttttcctgaagttgaattctgtgactactgaggacacagctacatattactgtgcggactttgactactggggccaaggcaccactctcacagtctccagcgctagcaccaagggccccagcgtgttccccctggcacccagcagcaagagcacatctggcggaacagccgctctgggctgtctggtgaaagactacttccccgagcccgtgaccgtgtcttggaactctggcgccctgaccagcggcgtgcacacctttccagccgtgctgcagagcagcggcctgtactccctgtcctccgtggtcaccgtgccctctagctccctgggaacacagacatatatctgtaatgtcaatcacaagccttccaacaccaaagtcgataagaaagtcgagcccaagagctgcgacaaaactcacacatgcccaccgtgcccagcacctgaagctgcagggggaccgtcagtcttcctcttccccccaaaacccaaggacaccctcatgatctcccggacccctgaggtcacatgcgtggtggtggacgtgagccacgaagaccctgaggtcaagttcaactggtacgtggacggcgtggaggtgcataatgccaagacaaagccgcgggaggagcagtacaacagcacgtaccgtgtggtcagcgtcctcaccgtcctgcaccaggactggctgaatggcaaggagtacaagtgcaaggtctccaacaaagccctcggcgcccccatcgagaaaaccatctccaaagccaaagggcagccccgagaaccacaggtgtacaccctgcccccatgccgggatgagctgaccaagaaccaggtcagcctgtggtgcctggtcaaaggcttctatcccagcgacatcgccgtggagtgggagagcaatgggcagccggagaacaactacaagaccacgcctcccgtgctggactccgacggctccttcttcctctacagcaagctcaccgtggacaagagcaggtggcagcaggggaacgtcttctcatgctccgtgatgcatgaggctctgcacaaccactacacgcagaagagcctctccctgtctccgggtaaa

SEQ ID NO: 219 - protein, 685 aa, Artificial Sequence
  LC007(VH-CH1)-CH2527(VH-CL)-Fc(knob) P329G LALA
EVQLQESGPGLVKPSQSLSLTCSVTGYSITSGYYWNWIRQFPGNKLEWMGYITYDGSNNYNPSLKNRISITRDTSKNQFFLKLNSVTTEDTATYYCADFDYWGQGTTLTVSSASTKGPSVFPLAPSSKSTSGGTAALGCLVKDYFPEPVTVSWNSGALTSGVHTFPAVLQSSGLYSLSSVVTVPSSSLGTQTYICNVNHKPSNTKVDKKVEPKSCDGGGGSGGGGSEVQLVESGGGLVQPKGSLKLSCAASGFTFNTYAMNWVRQAPGKGLEWVARIRSKYNNYATYYADSVKDRFTISRDDSQSILYLQMNNLKTEDTAMYYCVRHGNFGNSYVSWFAYWGQGTLVTVSAASVAAPSVFIFPPSDEQLKSGTASVVCLLNNFYPREAKVQWKVDNALQSGNSQESVTEQDSKDSTYSLSSTLTLSKADYEKHKVYACEVTHQGLSSPVTKSFNRGECDKTHTCPPCPAPEAAGGPSVFLFPPKPKDTLMISRTPEVTCVVVDVSHEDPEVKFNWYVDGVEVHNAKTKPREEQYNSTYRVVSVLTVLHQDWLNGKEYKCKVSNKALGAPIEKTISKAKGQPREPQVYTLPPCRDELTKNQVSLWCLVKGFYPSDIAVEWESNGQPENNYKTTPPVLDSDGSFFLYSKLTVDKSRWQQGNVFSCSVMHEALHNHYTQKSLSLSPGK

SEQ ID NO: 220 - DNA, 2055 bp, Artificial Sequence
  LC007(VH-CH1)-CH2527(VH-CL)-Fc(knob) P329G LALA
gaggtgcagctgcaggaatctggccctggcctggtcaagccaagccagagtctgagcctgacctgcagcgtgaccggctacagcattaccagcggctactactggaactggattcggcagttccccggcaataagctggaatggatgggctacatcacctacgacggcagcaacaactacaaccccagcctgaagaaccggatcagcatcacccgggacaccagcaagaaccagttcttcctgaagctgaacagcgtgaccaccgaggacaccgccacatactattgcgccgacttcgactactggggccagggcaccaccctgaccgtgtccagcgccagcacaaagggccctagcgtgttccctctggcccccagcagcaagagcacaagcggcggaacagccgccctgggctgcctcgtgaaggactacttccccgagcccgtgacagtgtcttggaacagcggagccctgacaagcggcgtgcacaccttccctgccgtgctgcagagcagcggcctgtactccctgagcagcgtggtcaccgtgcctagcagcagcctgggcacccagacctacatctgcaacgtgaaccacaagcccagcaacaccaaagtggacaagaaggtggagcccaagagctgtgatggcggaggagggtccggaggcggaggatccgaagtgcagctggtggaaagcggcggaggcctggtgcagcctaagggctctctgaagctgagctgtgccgccagcggcttcaccttcaacacctacgccatgaactgggtgcgccaggcccctggcaaaggcctggaatgggtggcccggatcagaagcaagtacaacaattacgccacctactacgccgacagcgtgaaggaccggttcaccatcagccgggacgacagccagagcatcctgtacctgcagatgaacaacctgaaaaccgaggacaccgccatgtactactgcgtgcggcacggcaacttcggcaacagctatgtgtcttggtttgcctactggggccagggcaccctcgtgacagtgtctgctgctagcgtggccgctccctccgtgtttatctttcccccatccgatgaacagctgaaaagcggcaccgcctccgtcgtgtgtctgctgaacaatttttaccctagggaagctaaagtgcagtggaaagtggataacgcactgcagtccggcaactcccaggaatctgtgacagaacaggactccaaggacagcacctactccctgtcctccaccctgacactgtctaaggctgattatgagaaacacaaagtctacgcctgcgaagtcacccatcagggcctgagctcgcccgtcacaaagagcttcaacaggggagagtgtgacaagacccacacctgtcccccttgtcctgcccctgaagctgctggcggcccttctgtgttcctgttccccccaaagcccaaggacaccctgatgatcagccggacccccgaagtgacctgcgtggtggtggatgtgtcccacgaggaccctgaagtgaagttcaattggtacgtggacggcgtggaagtgcacaacgccaagacaaagccgcgggaggagcagtacaacagcacgtaccgtgtggtcagcgtcctcaccgtcctgcaccaggactggctgaatggcaaggagtacaagtgcaaggtctccaacaaagccctcggcgcccccatcgagaaaaccatctccaaagccaaagggcagccccgagaaccacaggtgtacaccctgcccccatgccgggatgagctgaccaagaaccaggtcagcctgtggtgcctggtcaaaggcttctatcccagcgacatcgccgtggagtgggagagcaatgggcagccggagaacaactacaagaccacgcctcccgtgctggactccgacggctccttcttcctctacagcaagctcaccgtggacaagagcaggtggcagcaggggaacgtcttctcatgctccgtgatgcatgaggctctgcacaaccactacacgcagaagagcctctccctgtctccgggtaaa

SEQ ID NO: 221 - protein, 218 aa, Artificial Sequence
  anti-CD33(VL-CL)
DIQMTQSPSSLSASVGDRVTITCRASESVDNYGISFMNWFQQKPGKAPKLLIYAASNQGSGVPSRFSGSGSGTDFTLTISSLQPDDFATYYCQQSKEVPWTFGQGTKVEIKRTVAAPSVFIFPPSDEQLKSGTASVVCLLNNFYPREAKVQWKVDNALQSGNSQESVTEQDSKDSTYSLSSTLTLSKADYEKHKVYACEVTHQGLSSPVTKSFNRGEC

SEQ ID NO: 222 - DNA, 654 bp, Artificial Sequence
  anti-CD33(VL-CL)
gacatccagatgacccagagccccagcagcctgagcgccagcgtgggcgacagagtgaccatcacctgtcgggccagcgagagcgtggacaactacggcatcagcttcatgaactggttccagcagaagcccggcaaggcccccaagctgctgatctacgccgccagcaatcagggcagcggcgtgcccagcagattcagcggctctggcagcggcaccgacttcaccctgaccatcagcagcctgcagcccgacgacttcgccacctactactgccagcagagcaaagaggtgccctggaccttcggccagggcaccaaggtggaaatcaagcgtacggtggctgcaccatctgtcttcatcttcccgccatctgatgagcagttgaaatctggaactgcctctgttgtgtgcctgctgaataacttctatcccagagaggccaaagtacagtggaaggtggataacgccctccaatcgggtaactcccaggagagtgtcacagagcaggacagcaaggacagcacctacagcctcagcagcaccctgacgctgagcaaagcagactacgagaaacacaaagtctacgcctgcgaagtcacccatcagggcctgagctcgcccgtcacaaagagcttcaacaggggagagtgt

SEQ ID NO: 223 - protein, 668 aa, Artificial Sequence
  V9(VL-CH1)-anti-CD33(VH-CH1)-Fc(knob) P329G LALA
DIQMTQSPSSLSASVGDRVTITCRASQDIRNYLNWYQQKPGKAPKLLIYYTSRLESGVPSRFSGSGSGTDYTLTISSLQPEDFATYYCQQGNTLPWTFGQGTKVEIKSSASTKGPSVFPLAPSSKSTSGGTAALGCLVKDYFPEPVTVSWNSGALTSGVHTFPAVLQSSGLYSLSSVVTVPSSSLGTQTYICNVNHKPSNTKVDKKVEPKSCGGGGSGGGGSQVQLVQSGAEVKKPGSSVKVSCKASGYTFTDYNMHWVRQAPGQGLEWIGYIYPYNGGTGYNQKFKSKATITADESTNTAYMELSSLRSEDTAVYYCARGRPAMDYWGQGTLVTVSSASTKGPSVFPLAPSSKSTSGGTAALGCLVKDYFPEPVTVSWNSGALTSGVHTFPAVLQSSGLYSLSSVVTVPSSSLGTQTYICNVNHKPSNTKVDKKVEPKSCDKTHTCPPCPAPEAAGGPSVFLFPPKPKDTLMISRTPEVTCVVVDVSHEDPEVKFNWYVDGVEVHNAKTKPREEQYNSTYRVVSVLTVLHQDWLNGKEYKCKVSNKALGAPIEKTISKAKGQPREPQVYTLPPCRDELTKNQVSLWCLVKGFYPSDIAVEWESNGQPENNYKTTPPVLDSDGSFFLYSKLTVDKSRWQQGNVFSCSVMHEALHNHYTQKSLSLSPGK

SEQ ID NO: 224 - DNA, 2004 bp, Artificial Sequence
  V9(VL-CH1)-anti-CD33(VH-CH1)-Fc(knob) P329G LALA
gatatccagatgacccagagccccagctctctgagcgccagcgtgggcgacagagtgaccatcacctgtcgggccagccaggacatcagaaactacctgaactggtatcagcagaagcccggcaaggcccccaagctgctgatctactacaccagcagactggaaagcggcgtgccctccagattttccggcagcggctccggcaccgactacaccctgaccatcagcagcctgcagcccgaggatttcgccacatattactgccagcagggcaataccctgccctggaccttcggacagggcacaaaagtggaaatcaagagcagcgcttccaccaaaggcccttccgtgtttcctctggctcctagctccaagtccacctctggaggcaccgctgctctcggatgcctcgtgaaggattattttcctgagcctgtgacagtgtcctggaatagcggagcactgacctctggagtgcatactttccccgctgtgctgcagtcctctggactgtacagcctgagcagcgtggtgacagtgcccagcagcagcctgggcacccagacctacatctgcaacgtgaaccacaagcccagcaacaccaaggtggacaagaaggtggaacccaagtcttgtggcggaggcggatccggcggaggcggatctcaggtgcagctggtgcagtctggcgccgaagtgaagaaacccggcagcagcgtgaaggtgtcctgcaaggccagcggctacaccttcaccgactacaacatgcactgggtccgccaggccccaggccagggactggaatggatcggctacatctacccctacaacggcggcaccggctacaaccagaagttcaagagcaaggccaccatcaccgccgacgagagcaccaacaccgcctacatggaactgagcagcctgcggagcgaggacaccgccgtgtactactgcgccagaggcagacccgccatggactactggggccagggcaccctggtgacagtgtccagcgccagcacaaagggccccagcgtgttccccctggcacccagcagcaagagcacatctggcggaacagccgctctgggctgtctggtgaaagactacttccccgagcccgtgaccgtgtcttggaactctggcgccctgaccagcggcgtgcacacctttccagccgtgctgcagagcagcggcctgtactccctgtcctccgtggtcaccgtgccctctagctccctgggaacacagacatatatctgtaatgtcaatcacaagccttccaacaccaaagtcgataagaaagtcgagcccaagagctgcgacaaaactcacacatgcccaccgtgcccagcacctgaagctgcagggggaccgtcagtcttcctcttccccccaaaacccaaggacaccctcatgatctcccggacccctgaggtcacatgcgtggtggtggacgtgagccacgaagaccctgaggtcaagttcaactggtacgtggacggcgtggaggtgcataatgccaagacaaagccgcgggaggagcagtacaacagcacgtaccgtgtggtcagcgtcctcaccgtcctgcaccaggactggctgaatggcaaggagtacaagtgcaaggtctccaacaaagccctcggcgcccccatcgagaaaaccatctccaaagccaaagggcagccccgagaaccacaggtgtacaccctgcccccatgccgggatgagctgaccaagaaccaggtcagcctgtggtgcctggtcaaaggcttctatcccagcgacatcgccgtggagtgggagagcaatgggcagccggagaacaactacaagaccacgcctcccgtgctggactccgacggctccttcttcctctacagcaagctcaccgtggacaagagcaggtggcagcaggggaacgtcttctcatgctccgtgatgcatgaggctctgcacaaccactacacgcagaagagcctctccctgtctccgggtaaa

SEQ ID NO: 225 - protein, 446 aa, Artificial Sequence
  anti-CD33(VH-CH1)-Fc(hole) P329G LALA
QVQLVQSGAEVKKPGSSVKVSCKASGYTFTDYNMHWVRQAPGQGLEWIGYIYPYNGGTGYNQKFKSKATITADESTNTAYMELSSLRSEDTAVYYCARGRPAMDYWGQGTLVTVSSASTKGPSVFPLAPSSKSTSGGTAALGCLVKDYFPEPVTVSWNSGALTSGVHTFPAVLQSSGLYSLSSVVTVPSSSLGTQTYICNVNHKPSNTKVDKKVEPKSCDKTHTCPPCPAPEAAGGPSVFLFPPKPKDTLMISRTPEVTCVVVDVSHEDPEVKFNWYVDGVEVHNAKTKPREEQYNSTYRVVSVLTVLHQDWLNGKEYKCKVSNKALGAPIEKTISKAKGQPREPQVCTLPPSRDELTKNQVSLSCAVKGFYPSDIAVEWESNGQPENNYKTTPPVLDSDGSFFLVSKLTVDKSRWQQGNVFSCSVMHEALHNHYTQKSLSLSPGK

SEQ ID NO: 226 - DNA, 1338 bp, Artificial Sequence
  anti-CD33(VH-CH1)-Fc(hole) P329G LALA
caggtgcagctggtgcagtctggcgccgaagtgaagaaacccggcagcagcgtgaaggtgtcctgcaaggccagcggctacaccttcaccgactacaacatgcactgggtccgccaggccccaggccagggactggaatggatcggctacatctacccctacaacggcggcaccggctacaaccagaagttcaagagcaaggccaccatcaccgccgacgagagcaccaacaccgcctacatggaactgagcagcctgcggagcgaggacaccgccgtgtactactgcgccagaggcagacccgccatggactactggggccagggcaccctggtgacagtgtccagcgctagcaccaagggcccctccgtgttccccctggcccccagcagcaagagcaccagcggcggcacagccgctctgggctgcctggtcaaggactacttccccgagcccgtgaccgtgtcctggaacagcggagccctgacctccggcgtgcacaccttccccgccgtgctgcagagttctggcctgtatagcctgagcagcgtggtcaccgtgccttctagcagcctgggcacccagacctacatctgcaacgtgaaccacaagcccagcaacaccaaggtggacaagaaggtggagcccaagagctgcgacaaaactcacacatgcccaccgtgcccagcacctgaagctgcagggggaccgtcagtcttcctcttccccccaaaacccaaggacaccctcatgatctcccggacccctgaggtcacatgcgtggtggtggacgtgagccacgaagaccctgaggtcaagttcaactggtacgtggacggcgtggaggtgcataatgccaagacaaagccgcgggaggagcagtacaacagcacgtaccgtgtggtcagcgtcctcaccgtcctgcaccaggactggctgaatggcaaggagtacaagtgcaaggtctccaacaaagccctcggcgcccccatcgagaaaaccatctccaaagccaaagggcagccccgagaaccacaggtgtgcaccctgcccccatcccgggatgagctgaccaagaaccaggtcagcctctcgtgcgcagtcaaaggcttctatcccagcgacatcgccgtggagtgggagagcaatgggcagccggagaacaactacaagaccacgcctcccgtgctggactccgacggctccttcttcctcgtgagcaagctcaccgtggacaagagcaggtggcagcaggggaacgtcttctcatgctccgtgatgcatgaggctctgcacaaccactacacgcagaagagcctctccctgtctccgggtaaa

SEQ ID NO: 227 - protein, 219 aa, Artificial Sequence
  anti-CD20(VL-CL)
DIVMTQTPLSLPVTPGEPASISCRSSKSLLHSNGITYLYWYLQKPGQSPQLLIYQMSNLVSGVPDRFSGSGSGTDFTLKISRVEAEDVGVYYCAQNLELPYTFGGGTKVEIKRTVAAPSVFIFPPSDEQLKSGTASVVCLLNNFYPREAKVQWKVDNALQSGNSQESVTEQDSKDSTYSLSSTLTLSKADYEKHKVYACEVTHQGLSSPVTKSFNRGEC

SEQ ID NO: 228 - DNA, 657 bp, Artificial Sequence
  anti-CD20(VL-CL)
gatatcgtgatgacccagactccactctccctgcccgtcacccctggagagcccgccagcattagctgcaggtctagcaagagcctcttgcacagcaatggcatcacttatttgtattggtacctgcaaaagccagggcagtctccacagctcctgatttatcaaatgtccaaccttgtctctggcgtccctgaccggttctccggatccgggtcaggcactgatttcacactgaaaatcagcagggtggaggctgaggatgttggagtttattactgcgctcagaatctagaacttccttacaccttcggcggagggaccaaggtggagatcaaacgtacggtggctgcaccatctgtcttcatcttcccgccatctgatgagcagttgaaatctggaactgcctctgttgtgtgcctgctgaataacttctatcccagagaggccaaagtacagtggaaggtggataacgccctccaatcgggtaactcccaggagagtgtcacagagcaggacagcaaggacagcacctacagcctcagcagcaccctgacgctgagcaaagcagactacgagaaacacaaagtctacgcctgcgaagtcacccatcagggcctgagctcgcccgtcacaaagagcttcaacaggggagagtgt

SEQ ID NO: 229 - protein, 671 aa, Artificial Sequence
  V9(VL-CH1)-anti-CD20(VH-CH1)-Fc(knob) P329G LALA
DIQMTQSPSSLSASVGDRVTITCRASQDIRNYLNWYQQKPGKAPKLLIYYTSRLESGVPSRFSGSGSGTDYTLTISSLQPEDFATYYCQQGNTLPWTFGQGTKVEIKSSASTKGPSVFPLAPSSKSTSGGTAALGCLVKDYFPEPVTVSWNSGALTSGVHTFPAVLQSSGLYSLSSVVTVPSSSLGTQTYICNVNHKPSNTKVDKKVEPKSCGGGGSGGGGSQVQLVQSGAEVKKPGSSVKVSCKASGYAFSYSWINWVRQAPGQGLEWMGRIFPGDGDTDYNGKFKGRVTITADKSTSTAYMELSSLRSEDTAVYYCARNVFDGYWLVYWGQGTLVTVSSASTKGPSVFPLAPSSKSTSGGTAALGCLVKDYFPEPVTVSWNSGALTSGVHTFPAVLQSSGLYSLSSVVTVPSSSLGTQTYICNVNHKPSNTKVDKKVEPKSCDKTHTCPPCPAPEAAGGPSVFLFPPKPKDTLMISRTPEVTCVVVDVSHEDPEVKFNWYVDGVEVHNAKTKPREEQYNSTYRVVSVLTVLHQDWLNGKEYKCKVSNKALGAPIEKTISKAKGQPREPQVYTLPPCRDELTKNQVSLWCLVKGFYPSDIAVEWESNGQPENNYKTTPPVLDSDGSFFLYSKLTVDKSRWQQGNVFSCSVMHEALHNHYTQKSLSLSPGK

SEQ ID NO: 230 - DNA, 2013 bp, Artificial Sequence
  V9(VL-CH1)-anti-CD20(VH-CH1)-Fc(knob) P329G LALA
gatatccagatgacccagagccccagctctctgagcgccagcgtgggcgacagagtgaccatcacctgtcgggccagccaggacatcagaaactacctgaactggtatcagcagaagcccggcaaggcccccaagctgctgatctactacaccagcagactggaaagcggcgtgccctccagattttccggcagcggctccggcaccgactacaccctgaccatcagcagcctgcagcccgaggatttcgccacatattactgccagcagggcaataccctgccctggaccttcggacagggcacaaaagtggaaatcaagagcagcgcttccaccaaaggcccttccgtgtttcctctggctcctagctccaagtccacctctggaggcaccgctgctctcggatgcctcgtgaaggattattttcctgagcctgtgacagtgtcctggaatagcggagcactgacctctggagtgcatactttccccgctgtgctgcagtcctctggactgtacagcctgagcagcgtggtgacagtgcccagcagcagcctgggcacccagacctacatctgcaacgtgaaccacaagcccagcaacaccaaggtggacaagaaggtggaacccaagtcttgtggcggaggcggatccggcggagggggatctcaggtgcaattggtgcagtctggcgctgaagttaagaagcctgggagttcagtgaaggtctcctgcaaggcttccggatacgccttcagctattcttggatcaattgggtgcggcaggcgcctggacaagggctcgagtggatgggacggatctttcccggcgatggggatactgactacaatgggaaattcaagggcagagtcacaattaccgccgacaaatccactagcacagcctatatggagctgagcagcctgagatctgaggacacggccgtgtattactgtgcaagaaatgtctttgatggttactggcttgtttactggggccagggaaccctggtcaccgtctcctcagctagcaccaagggccccagcgtgttccccctggcacccagcagcaagagcacatctggcggaacagccgctctgggctgtctggtgaaagactacttccccgagcccgtgaccgtgtcttggaactctggcgccctgaccagcggcgtgcacacctttccagccgtgctgcagagcagcggcctgtactccctgtcctccgtggtcaccgtgccctctagctccctgggaacacagacatatatctgtaatgtcaatcacaagccttccaacaccaaagtcgataagaaagtcgagcccaagagctgcgacaaaactcacacatgcccaccgtgcccagcacctgaagctgcagggggaccgtcagtcttcctcttccccccaaaacccaaggacaccctcatgatctcccggacccctgaggtcacatgcgtggtggtggacgtgagccacgaagaccctgaggtcaagttcaactggtacgtggacggcgtggaggtgcataatgccaagacaaagccgcgggaggagcagtacaacagcacgtaccgtgtggtcagcgtcctcaccgtcctgcaccaggactggctgaatggcaaggagtacaagtgcaaggtctccaacaaagccctcggcgcccccatcgagaaaaccatctccaaagccaaagggcagccccgagaaccacaggtgtacaccctgcccccatgccgggatgagctgaccaagaaccaggtcagcctgtggtgcctggtcaaaggcttctatcccagcgacatcgccgtggagtgggagagcaatgggcagccggagaacaactacaagaccacgcctcccgtgctggactccgacggctccttcttcctctacagcaagctcaccgtggacaagagcaggtggcagcaggggaacgtcttctcatgctccgtgatgcatgaggctctgcacaaccactacacgcagaagagcctctccctgtctccgggtaaa

SEQ ID NO: 231 - protein, 449 aa, Artificial Sequence
  anti-CD20(VH-CH1)-Fc(hole) P329G LALA
QVQLVQSGAEVKKPGSSVKVSCKASGYAFSYSWINWVRQAPGQGLEWMGRIFPGDGDTDYNGKFKGRVTITADKSTSTAYMELSSLRSEDTAVYYCARNVFDGYWLVYWGQGTLVTVSSASTKGPSVFPLAPSSKSTSGGTAALGCLVKDYFPEPVTVSWNSGALTSGVHTFPAVLQSSGLYSLSSVVTVPSSSLGTQTYICNVNHKPSNTKVDKKVEPKSCDKTHTCPPCPAPEAAGGPSVFLFPPKPKDTLMISRTPEVTCVVVDVSHEDPEVKFNWYVDGVEVHNAKTKPREEQYNSTYRVVSVLTVLHQDWLNGKEYKCKVSNKALGAPIEKTISKAKGQPREPQVCTLPPSRDELTKNQVSLSCAVKGFYPSDIAVEWESNGQPENNYKTTPPVLDSDGSFFLVSKLTVDKSRWQQGNVFSCSVMHEALHNHYTQKSLSLSPGK

SEQ ID NO: 232 - DNA, 1347 bp, Artificial Sequence
  anti-CD20(VH-CH1)-Fc(hole) P329G LALA
caggtgcaattggtgcagtctggcgctgaagttaagaagcctgggagttcagtgaaggtctcctgcaaggcttccggatacgccttcagctattcttggatcaattgggtgcggcaggcgcctggacaagggctcgagtggatgggacggatctttcccggcgatggggatactgactacaatgggaaattcaagggcagagtcacaattaccgccgacaaatccactagcacagcctatatggagctgagcagcctgagatctgaggacacggccgtgtattactgtgcaagaaatgtctttgatggttactggcttgtttactggggccagggaaccctggtcaccgtctcctcagctagcaccaagggcccatcggtcttccccctggcaccctcctccaagagcacctctgggggcacagcggccctgggctgcctggtcaaggactacttccccgaaccggtgacggtgtcgtggaactcaggcgccctgaccagcggcgtgcacaccttcccggctgtcctacagtcctcaggactctactccctcagcagcgtggtgaccgtgccctccagcagcttgggcacccagacctacatctgcaacgtgaatcacaagcccagcaacaccaaggtggacaagaaagttgagcccaaatcttgtgacaaaactcacacatgcccaccgtgcccagcacctgaagctgcagggggaccgtcagtcttcctcttccccccaaaacccaaggacaccctcatgatctcccggacccctgaggtcacatgcgtggtggtggacgtgagccacgaagaccctgaggtcaagttcaactggtacgtggacggcgtggaggtgcataatgccaagacaaagccgcgggaggagcagtacaacagcacgtaccgtgtggtcagcgtcctcaccgtcctgcaccaggactggctgaatggcaaggagtacaagtgcaaggtctccaacaaagccctcggcgcccccatcgagaaaaccatctccaaagccaaagggcagccccgagaaccacaggtgtgcaccctgcccccatcccgggatgagctgaccaagaaccaggtcagcctctcgtgcgcagtcaaaggcttctatcccagcgacatcgccgtggagtgggagagcaatgggcagccggagaacaactacaagaccacgcctcccgtgctggactccgacggctccttcttcctcgtgagcaagctcaccgtggacaagagcaggtggcagcaggggaacgtcttctcatgctccgtgatgcatgaggctctgcacaaccactacacgcagaagagcctctccctgtctccgggtaaa

SEQ ID NO: 233 - protein, 11 aa, Artificial Sequence
  M4-3 ML2 HCDR1
GGSITSGYYWN

SEQ ID NO: 234 - DNA, 33 bp, Artificial Sequence
  M4-3 ML2 HCDR1
ggcggcagcatcaccagcggctactactggaac

SEQ ID NO: 235 - protein, 16 aa, Artificial Sequence
  M4-3 ML2 HCDR2
YITYDGSNNYNPSLKS

SEQ ID NO: 236 - DNA, 48 bp, Artificial Sequence
  M4-3 ML2 HCDR2
tacatcacctacgacggcagcaacaactacaaccccagcctgaagtcc

SEQ ID NO: 237 - protein, 3 aa, Artificial Sequence
  M4-3 ML2 HCDR3
FDY

SEQ ID NO: 238 - DNA, 9 bp, Artificial Sequence
  M4-3 ML2 HCDR3
ttcgactac

SEQ ID NO: 239 - protein, 112 aa, Artificial Sequence
  M4-3 ML2 VH
QVQLQESGPGLVKPSQTLSLTCTVSGGSITSGYYWNWIRQHPGKGLEWIGYITYDGSNNYNPSLKSRVTISRDTSKNQFSLKLSSVTAADTAVYYCADFDYWGQGTLVTVSS

SEQ ID NO: 240 - DNA, 336 bp, Artificial Sequence
  M4-3 ML2 VH
caggtgcagctgcaggaaagcggccctggcctggtcaagcccagccagaccctgagcctgacctgcaccgtgtccggcggcagcatcaccagcggctactactggaactggatccggcagcaccccggcaagggcctggaatggatcggctacatcacctacgacggcagcaacaactacaaccccagcctgaagtccagagtgaccatcagccgggacaccagcaagaaccagttcagcctgaagctgtccagcgtgacagccgccgacaccgccgtgtactactgcgccgacttcgactactggggccagggcaccctggtcaccgtgtccagc

SEQ ID NO: 241 - protein, 11 aa, Artificial Sequence
  M4-3 ML2 LCDR1
RASQGIRNYLN

SEQ ID NO: 242 - DNA, 33 bp, Artificial Sequence
  M4-3 ML2 LCDR1
cgggccagccagggcatccggaactacctgaac

SEQ ID NO: 243 - protein, 7 aa, Artificial Sequence
  M4-3 ML2 LCDR2
YTSSLHS

SEQ ID NO: 244 - DNA, 21 bp, Artificial Sequence
  M4-3 ML2 LCDR2
tacaccagcagcctgcacagc

SEQ ID NO: 245 - protein, 9 aa, Artificial Sequence
  M4-3 ML2 LCDR3
QQYSKLPWT

SEQ ID NO: 246 - DNA, 27 bp, Artificial Sequence
  M4-3 ML2 LCDR3
cagcagtacagcaagctgccctggacc

SEQ ID NO: 247 - protein, 107 aa, Artificial Sequence
  M4-3 ML2 VL
DIQMTQSPSSLSASVGDRVTITCRASQGIRNYLNWYQQKPGKAPKLLIYYTSSLHSGVPSRFSGSGSGTDFTLTISSLQPEDFATYYCQQYSKLPWTFGQGTKVEIK

SEQ ID NO: 248 - DNA, 321 bp, Artificial Sequence
  M4-3 ML2 VL
gacatccagatgacccagagccccagcagcctgagcgccagcgtgggcgacagagtgaccatcacctgccgggccagccagggcatccggaactacctgaactggtatcagcagaagcccggcaaggcccccaagctgctgatctactacaccagcagcctgcacagcggcgtgcctagccggtttagcggcagcggctccggcaccgacttcaccctgaccattagctccctgcagcccgaggacttcgccacctactactgccagcagtacagcaagctgccctggaccttcggccagggaacaaaggtggagatcaag

SEQ ID NO: 249 - protein, 5 aa, Artificial Sequence
  anti-CD3 HCDR1
TYAMN

SEQ ID NO: 250 - DNA, 15 bp, Artificial Sequence
  anti-CD3 HCDR1
acctacgccatgaac

SEQ ID NO: 251 - protein, 19 aa, Artificial Sequence
  anti-CD3 HCDR2
RIRSKYNNYATYYADSVKD

SEQ ID NO: 252 - DNA, 57 bp, Artificial Sequence
  anti-CD3 HCDR2
cggatcagaagcaagtacaacaattacgccacctactacgccgacagcgtgaaggac

SEQ ID NO: 253 - protein, 14 aa, Artificial Sequence
  anti-CD3 HCDR3
HGNFGNSYVSWFAY

SEQ ID NO: 254 - DNA, 42 bp, Artificial Sequence
  anti-CD3 HCDR3
cacggcaacttcggcaacagctatgtgtcttggtttgcctac

SEQ ID NO: 255 - protein, 125 aa, Artificial Sequence
  anti-CD3 VH
EVKLLESGGGLVQPKGSLKLSCAASGFTFNTYAMNWVRQAPGKGLEWVARIRSKYNNYATYYADSVKDRFTISRDDSQSILYLQMNNLKTEDTAMYYCVRHGNFGNSYVSWFAYWGQGTLVTVSA

SEQ ID NO: 256 - DNA, 375 bp, Artificial Sequence
  anti-CD3 VH
gaagtgcagctggtggaaagcggcggaggcctggtgcagcctaagggctctctgaagctgagctgtgccgccagcggcttcaccttcaacacctacgccatgaactgggtgcgccaggcccctggcaaaggcctggaatgggtggcccggatcagaagcaagtacaacaattacgccacctactacgccgacagcgtgaaggaccggttcaccatcagccgggacgacagccagagcatcctgtacctgcagatgaacaacctgaaaaccgaggacaccgccatgtactactgcgtgcggcacggcaacttcggcaacagctatgtgtcttggtttgcctactggggccagggcaccctcgtgacagtgtctgct

SEQ ID NO: 257 - protein, 14 aa, Artificial Sequence
  anti-CD3 LCDR1
RSSTGAVTTSNYAN

SEQ ID NO: 258 - DNA, 42 bp, Artificial Sequence
  anti-CD3 LCDR1
agatctagcacaggcgccgtgaccaccagcaactacgccaac

SEQ ID NO: 259 - protein, 7 aa, Artificial Sequence
  anti-CD3 LCDR2
GTNKRAP

SEQ ID NO: 260 - DNA, 21 bp, Artificial Sequence
  anti-CD3 LCDR2
ggcaccaacaaaagggctcca

SEQ ID NO: 261 - protein, 9 aa, Artificial Sequence
  anti-CD3 LCDR3
ALWYSNLWV

SEQ ID NO: 262 - DNA, 27 bp, Artificial Sequence
  anti-CD3 LCDR3
gccctgtggtacagcaacctgtgggtg

SEQ ID NO: 263 - protein, 109 aa, Artificial Sequence
  anti-CD3 VL
QAVVTQESALTTSPGETVTLTCRSSTGAVTTSNYANWVQEKPDHLFTGLIGGTNKRAPGVPARFSGSLIGDKAALTITGAQTEDEAIYFCALWYSNLWVFGGGTKLTVL

SEQ ID NO: 264 - DNA, 327 bp, Artificial Sequence
  anti-CD3 VL
caggccgtcgtgacccaggaaagcgccctgacaacaagccctggcgagacagtgaccctgacctgcagatctagcacaggcgccgtgaccaccagcaactacgccaactgggtgcaggaaaagcccgaccacctgttcaccggcctgatcggcggcaccaacaaaagggctccaggcgtgccagccagattcagcggcagcctgattggcgataaggccgccctgaccatcactggcgcccagacagaggacgaggccatctacttttgcgccctgtggtacagcaacctgtgggtgttcggcggaggcaccaagctgacagtgctg

SEQ ID NO: 265 - protein, 207 aa, Homo sapiens
MQSGTHWRVLGLCLLSVGVWGQDGNEEMGGITQTPYKVSISGTTVILTCPQYPGSEILWQHNDKNIGGDEDDKNIGSDEDHLSLKEFSELEQSGYYVCYPRGSKPEDANFYLYLRARVCENCMEMDVMSVATIVIVDICITGGLLLLVYYWSKNRKAKAKPVTRGAGAGGRQRGQNKERPPPVPNPDYEPIRKGQRDLYSGLNQRRI

SEQ ID NO: 266 - protein, 198 aa, Macaca fascicularis
MQSGTRWRVLGLCLLSIGVWGQDGNEEMGSITQTPYQVSISGTTVILTCSQHLGSEAQWQHNGKNKEDSGDRLFLPEFSEMEQSGYYVCYPRGSNPEDASHHLYLKARVCENCMEMDVMAVATIVIVDICITLGLLLLVYYWSKNRKAKAKPVTRGAGAGGRQRGQNKERPPPVPNPDYEPIRKGQQDLYSGLNQRRI

SEQ ID NO: 267 - protein, 455 aa, Artificial Sequence
  HC CD3 CH2527 (VH_3-23(12))
EVQLLESGGGLVQPGGSLRLSCAASGFTFSTYAMNWVRQAPGKGLEWVSRIRSKYNNYATYYADSVKGRFTISRDDSKNTLYLQMNSLRAEDTAVYYCVRHGNFGNSYVSWFAYWGQGTLVTVSSASTKGPSVFPLAPSSKSTSGGTAALGCLVKDYFPEPVTVSWNSGALTSGVHTFPAVLQSSGLYSLSSVVTVPSSSLGTQTYICNVNHKPSNTKVDKKVEPKSCDKTHTCPPCPAPELLGGPSVFLFPPKPKDTLMISRTPEVTCVVVDVSHEDPEVKFNWYVDGVEVHNAKTKPREEQYNSTYRVVSVLTVLHQDWLNGKEYKCKVSNKALPAPIEKTISKAKGQPREPQVYTLPPSRDELTKNQVSLTCLVKGFYPSDIAVEWESNGQPENNYKTTPPVLDSDGSFFLYSKLTVDKSRWQQGNVFSCSVMHEALHNHYTQKSLSLSPGK

SEQ ID NO: 268 - protein, 215 aa, Artificial Sequence
  LC CD3 CH2527 (VL_7-46(13))
QAVVTQEPSLTVSPGGTVTLTCGSSTGAVTTSNYANWVQEKPGQAFRGLIGGTNKRAPGTPARFSGSLLGGKAALTLSGAQPEDEAEYYCALWYSNLWVFGGGTKLTVLGQPKAAPSVTLFPPSSEELQANKATLVCLISDFYPGAVTVAWKADSSPVKAGVETTTPSKQSNNKYAASSYLSLTPEQWKSHRSYSCQVTHEGSTVEKTVAPTECS

SEQ ID NO: 269 - protein, 125 aa, Artificial Sequence
  VH CD3 CH2527 (VH_3-23(12))
EVQLLESGGGLVQPGGSLRLSCAASGFTFSTYAMNWVRQAPGKGLEWVSRIRSKYNNYATYYADSVKGRFTISRDDSKNTLYLQMNSLRAEDTAVYYCVRHGNFGNSYVSWFAYWGQGTLVTVSS

SEQ ID NO: 270 - protein, 5 aa, Artificial Sequence
  HCDR1 CD3 CH2527 (VH_3-23(12))
TYAMN

SEQ ID NO: 271 - protein, 19 aa, Artificial Sequence
  HCDR2 CD3 CH2527 (VH_3-23(12))
RIRSKYNNYATYYADSVKG

SEQ ID NO: 272 - protein, 14 aa, Artificial Sequence
  HCDR3 CD3 CH2527 (VH_3-23(12))
HGNFGNSYVSWFAY

SEQ ID NO: 273 - protein, 109 aa, Artificial Sequence
  VL CD3 CH2527 (VL_7-46(13))
QAVVTQEPSLTVSPGGTVTLTCGSSTGAVTTSNYANWVQEKPGQAFRGLIGGTNKRAPGTPARFSGSLLGGKAALTLSGAQPEDEAEYYCALWYSNLWVFGGGTKLTVL

SEQ ID NO: 274 - protein, 14 aa, Artificial Sequence
  LCDR1 CD3 CH2527 (VL_7-46(13))
GSSTGAVTTSNYAN

SEQ ID NO: 275 - protein, 7 aa, Artificial Sequence
  LCDR2 CD3 CH2527 (VL_7-46(13))
GTNKRAP

SEQ ID NO: 276 - protein, 9 aa, Artificial Sequence
  LCDR3 CD3 CH2527 (VL_7-46(13))
ALWYSNLWV

SEQ ID NO: 277 - protein, 442 aa, Artificial Sequence
  HC MCSP M4-3 (C1)$
QVQLQESGPGLVKPSQTLSLTCTVSGGSITSGYYWNWIRQHPGKGLEWIGYITFDGSNNYNPSLKSRVTISRDTSKNQFSLKLSSVTAADTAVYYCADFDYWGQGTLVTVSSASTKGPSVFPLAPSSKSTSGGTAALGCLVKDYFPEPVTVSWNSGALTSGVHTFPAVLQSSGLYSLSSVVTVPSSSLGTQTYICNVNHKPSNTKVDKKVEPKSCDKTHTCPPCPAPELLGGPSVFLFPPKPKDTLMISRTPEVTCVVVDVSHEDPEVKFNWYVDGVEVHNAKTKPREEQYNSTYRVVSVLTVLHQDWLNGKEYKCKVSNKALPAPIEKTISKAKGQPREPQVYTLPPSRDELTKNQVSLTCLVKGFYPSDIAVEWESNGQPENNYKTTPPVLDSDGSFFLYSKLTVDKSRWQQGNVFSCSVMHEALHNHYTQKSLSLSPGK

SEQ ID NO: 278 - protein, 214 aa, Artificial Sequence
  LC MCSP ML2 (G3)
DIQMTQSPSSLSASVGDRVTITCRASQGIRNYLNWYQQKPGKAPKLLIYYTSSLHSGVPSRFSGSGSGTDYTLTISSLQPEDFATYYCQQYSALPWTFGQGTKVEIKRTVAAPSVFIFPPSDEQLKSGTASVVCLLNNFYPREAKVQWKVDNALQSGNSQESVTEQDSKDSTYSLSSTLTLSKADYEKHKVYACEVTHQGLSSPVTKSFNRGEC

SEQ ID NO: 279 - protein, 112 aa, Artificial Sequence
  VH MCSP M4-3 (C1)
QVQLQESGPGLVKPSQTLSLTCTVSGGSITSGYYWNWIRQHPGKGLEWIGYITFDGSNNYNPSLKSRVTISRDTSKNQFSLKLSSVTAADTAVYYCADFDYWGQGTLVTVSS

SEQ ID NO: 280 - protein, 6 aa, Artificial Sequence
  HCDR1 MCSP M4-3 (C1)
SGYYWN

SEQ ID NO: 281 - protein, 16 aa, Artificial Sequence
  HCDR2 MCSP M4-3 (C1)
YITFDGSNNYNPSLKS

SEQ ID NO: 282 - protein, 3 aa, Artificial Sequence
  HCDR3 MCSP M4-3 (C1)
FDY

SEQ ID NO: 283 - protein, 107 aa, Artificial Sequence
  VL MCSP ML2 (G3)
DIQMTQSPSSLSASVGDRVTITCRASQGIRNYLNWYQQKPGKAPKLLIYYTSSLHSGVPSRFSGSGSGTDYTLTISSLQPEDFATYYCQQYSALPWTFGQGTKVEIK

SEQ ID NO: 284 - protein, 11 aa, Artificial Sequence
  LCDR1 MCSP ML2 (G3)
RASQGIRNYLN

SEQ ID NO: 285 - protein, 7 aa, Artificial Sequence
  LCDR2 MCSP ML2 (G3)
YTSSLHS

SEQ ID NO: 286 - protein, 9 aa, Artificial Sequence
  LCDR3 MCSP ML2 (G3)
QQYSALPWT

SEQ ID NO: 287 - protein, 451 aa, Artificial Sequence
  HC CEA CH1A1A 98-99
QVQLVQSGAEVKKPGASVKVSCKASGYTFTEFGMNWVRQAPGQGLEWMGWINTKTGEATYVEEFKGRVTFTTDTSTSTAYMELRSLRSDDTAVYYCARWDFAYYVEAMDYWGQGTTVTVSSASTKGPSVFPLAPSSKSTSGGTAALGCLVKDYFPEPVTVSWNSGALTSGVHTFPAVLQSSGLYSLSSVVTVPSSSLGTQTYICNVNHKPSNTKVDKKVEPKSCDKTHTCPPCPAPELLGGPSVFLFPPKPKDTLMISRTPEVTCVVVDVSHEDPEVKFNWYVDGVEVHNAKTKPREEQYNSTYRVVSVLTVLHQDWLNGKEYKCKVSNKALPAPIEKTISKAKGQPREPQVYTLPPSRDELTKNQVSLTCLVKGFYPSDIAVEWESNGQPENNYKTTPPVLDSDGSFFLYSKLTVDKSRWQQGNVFSCSVMHEALHNHYTQKSLSLSPGK

SEQ ID NO: 288 - protein, 215 aa, Artificial Sequence; identical to SEQ ID NO: 67
  LC CEA 2F1

SEQ ID NO: 289 - protein, 121 aa, Artificial Sequence; identical to SEQ ID NO: 123
  VH CEA CH1A1A 98-99

SEQ ID NO: 290 - protein, 5 aa, Artificial Sequence
  HCDR1 CEA CH1A1A 98-99
EFGMN

SEQ ID NO: 291 - protein, 17 aa, Artificial Sequence
  HCDR2 CEA CH1A1A 98-99
WINTKTGEATYVEEFKG

SEQ ID NO: 292 - protein, 12 aa, Artificial Sequence
  HCDR3 CEA CH1A1A 98-99
WDFAYYVEAMDY

SEQ ID NO: 293 - protein, 108 aa, Artificial Sequence; identical to SEQ ID NO: 131
  VL CEA 2F1

SEQ ID NO: 294 - protein, 11 aa, Artificial Sequence
  LCDR1 CEA 2F1
KASAAVGTYVA

SEQ ID NO: 295 - protein, 7 aa, Artificial Sequence
  LCDR2 CEA 2F1
SASYRKR

SEQ ID NO: 296 - protein, 10 aa, Artificial Sequence
  LCDR3 CEA 2F1
HQYYTYPLFT

SEQ ID NO: 297 - protein, 111 aa, Artificial Sequence
  VL CD3 CH2527 (VL_7-43(11))
QTVVTQEPSLTVSPGGTVTLTCGSSTGAVTTSNYANWVQQKPGQAPRGLIGGTNKRAPGTPARFSGSLLGGKAALTLSGVQPEDEAEYYCALWYSNLWVFGGGTKLTVLSS

SEQ ID NO: 298 - protein, 125 aa, Artificial Sequence
  VH CD3 CH2527 (VHcomboA49SV93A)
EVQLLESGGGLVQPGGSLRLSCAASGFTFSTYAMNWVRQAPGKGLEWVSRIRSKYNNYATYYADSVKGRFTISRDDSKNTLYLQMNSLRAEDTAVYYCARHGNFGNSYVSWFAYWGQGTLVTVSS

SEQ ID NO: 299 - protein, 125 aa, Artificial Sequence
  VH CD3 CH2527 (VHcomboA49SV93AR94K)
EVQLLESGGGLVQPGGSLRLSCAASGFTFSTYAMNWVRQAPGKGLEWVSRIRSKYNNYATYYADSVKGRFTISRDDSKNTLYLQMNSLRAEDTAVYYCAKHGNFGNSYVSWFAYWGQGTLVTVSS

SEQ ID NO: 300 - protein, 112 aa, Artificial Sequence
  VH MCSP M4-3 (D6)
QVQLQESGPGLVKPSQTLSLTCTVSGGSITSGYYWNWIRQHPGKGLEWIGYITFDGKNNYNPSLKSRVTISRDTSKNQFSLKLSSVTAADTAVYYCADFDYWGQGTLVTVSS

SEQ ID NO: 301 - protein, 15 aa, Artificial Sequence
  HCDR2 MCSP M4-3 (D6)
ITFDGKNNYNPSLKS

SEQ ID NO: 302 - protein, 112 aa, Artificial Sequence
  VH MCSP M4-3 (A7)
QVQLQESGPGLVKPSQTLSLTCTVSGGSITDGYYWNWIRQHPGKGLEWIGYITFDGRNNYNPSLKSRVTISRDTSKNQFSLKLSSVTAADTAVYYCADFDYWGQGTLVTVSS

SEQ ID NO: 303 - protein, 6 aa, Artificial Sequence
  HCDR1 MCSP M4-3 (A7)
DGYYWN

SEQ ID NO: 304 - protein, 15 aa, Artificial Sequence
  HCDR2 MCSP M4-3 (A7)
ITFDGRNNYNPSLKS

SEQ ID NO: 305 - protein, 112 aa, Artificial Sequence
  VH MCSP M4-3 (B7)
QVQLQESGPGLVKPSQTLSLTCTVSGGSITSGYYWNWIRQHPGKGLEWIGYITFDGINNYNPSLKSRVTISRDTSKNQFSLKLSSVTAADTAVYYCADFDYWGQGTLVTVSS

SEQ ID NO: 306 - protein, 15 aa, Artificial Sequence
  HCDR2 MCSP M4-3 (B7)
ITFDGINNYNPSLKS

SEQ ID NO: 307 - protein, 112 aa, Artificial Sequence
  VH MCSP M4-3 (B8)
QVQLQESGPGLVKPSQTLSLTCTVSGGSITSGYYWNWIRQHPGKGLEWIGYITFDGRNNYNPSLKSRVTISRDTSKNQFSLKLSSVTAADTAVYYCADFDYWGQGTLVTVSS

SEQ ID NO: 308 - protein, 112 aa, Artificial Sequence; identical to SEQ ID NO: 239
  VH MCSP M4-3

SEQ ID NO: 309 - protein, 107 aa, Artificial Sequence
  VL MCSP ML2 (E10)
DIQMTQSPSSLSASVGDRVTITCRASYGIRGYLNWYQQKPGKAPKLLIYYTSSLHSGVPSRFSGSGSGTDFTLTISSLQPEDFATYHCQQYSKLPWTFGQGTKVEIK

SEQ ID NO: 310 - protein, 11 aa, Artificial Sequence
  LCDR1 MCSP ML2 (E10)
RASYGIRGYLN

SEQ ID NO: 311 - protein, 9 aa, Artificial Sequence
  LCDR3 MCSP ML2 (E10)
QQYSKLPWT

SEQ ID NO: 312 - protein, 107 aa, Artificial Sequence
  VL MCSP ML2 (E10-G3)
DIQMTQSPSSLSASVGDRVTITCRASYGIRGYLNWYQQKPGKAPKLLIYYTSSLHSGVPSRFSGSGSGTDFTLTISSLQPEDFATYHCQQYSALPWTFGQGTKVEIK

SEQ ID NO: 313 - protein, 107 aa, Artificial Sequence
  VL MCSP ML2 (C5)
DIQMTQSPSSLSASVGDRVTITCRASRGIREYLNWYQQKPGKAPKLLIYYTGSLHSGVPSRFSGSGSGTDFTLTISSLQPEDFATYYCQQYSELPWTFGQGTKVEIK

SEQ ID NO: 314 - protein, 11 aa, Artificial Sequence
  LCDR1 MCSP ML2 (C5)
RASRGIREYLN

SEQ ID NO: 315 - protein, 7 aa, Artificial Sequence
  LCDR2 MCSP ML2 (C5)
YTGSLHS

SEQ ID NO: 316 - protein, 9 aa, Artificial Sequence
  LCDR3 MCSP ML2 (C5)
QQYSELPWT

SEQ ID NO: 317 - protein, 107 aa, Artificial Sequence
  VL MCSP ML2 (C5-G3)
DIQMTQSPSSLSASVGDRVTITCRASRGIREYLNWYQQKPGKAPKLLIYYTGSLHSGVPSRFSGSGSGTDFTLTISSLQPEDFATYYCQQYSALPWTFGQGTKVEIK

SEQ ID NO: 318 - protein, 107 aa, Artificial Sequence; identical to SEQ ID NO: 247
  VL MCSP ML2

SEQ ID NO: 319 - protein, 214 aa, Artificial Sequence
  LC CD3 CH2527  (Crossfab, VL-CH1)
QAVVTQEPSLTVSPGGTVTLTCGSSTGAVTTSNYANWVQEKPGQAFRGLIGGTNKRAPGTPARFSGSLLGGKAALTLSGAQPEDEAEYYCALWYSNLWVFGGGTKLTVLSSASTKGPSVFPLAPSSKSTSGGTAALGCLVKDYFPEPVTVSWNSGALTSGVHTFPAVLQSSGLYSLSSVVTVPSSSLGTQTYICNVNHKPSNTKVDKKVEPKSC

SEQ ID NO: 320 - protein, 685 aa, Artificial Sequence
  MCSP M4-3 (C1) (VH-CH1) - CD3 CH2527 (Crossfab VH-Ck) - Fc(knob) P329GLALA
QVQLQESGPGLVKPSQTLSLTCTVSGGSITSGYYWNWIRQHPGKGLEWIGYITFDGSNNYNPSLKSRVTISRDTSKNQFSLKLSSVTAADTAVYYCADFDYWGQGTLVTVSSASTKGPSVFPLAPSSKSTSGGTAALGCLVKDYFPEPVTVSWNSGALTSGVHTFPAVLQSSGLYSLSSVVTVPSSSLGTQTYICNVNHKPSNTKVDKKVEPKSCDGGGGSGGGGSEVQLLESGGGLVQPGGSLRLSCAASGFTFSTYAMNWVRQAPGKGLEWVSRIRSKYNNYATYYADSVKGRFTISRDDSKNTLYLQMNSLRAEDTAVYYCVRHGNFGNSYVSWFAYWGQGTLVTVSSASVAAPSVFIFPPSDEQLKSGTASVVCLLNNFYPREAKVQWKVDNALQSGNSQESVTEQDSKDSTYSLSSTLTLSKADYEKHKVYACEVTHQGLSSPVTKSFNRGECDKTHTCPPCPAPEAAGGPSVFLFPPKPKDTLMISRTPEVTCVVVDVSHEDPEVKFNWYVDGVEVHNAKTKPREEQYNSTYRVVSVLTVLHQDWLNGKEYKCKVSNKALGAPIEKTISKAKGQPREPQVYTLPPCRDELTKNQVSLWCLVKGFYPSDIAVEWESNGQPENNYKTTPPVLDSDGSFFLYSKLTVDKSRWQQGNVFSCSVMHEALHNHYTQKSLSLSPGK

SEQ ID NO: 321 - protein, 442 aa, Artificial Sequence
  MCSP M4-3 (C1) (VH-CH1) - Fc(hole) P329GLALA
QVQLQESGPGLVKPSQTLSLTCTVSGGSITSGYYWNWIRQHPGKGLEWIGYITFDGSNNYNPSLKSRVTISRDTSKNQFSLKLSSVTAADTAVYYCADFDYWGQGTLVTVSSASTKGPSVFPLAPSSKSTSGGTAALGCLVKDYFPEPVTVSWNSGALTSGVHTFPAVLQSSGLYSLSSVVTVPSSSLGTQTYICNVNHKPSNTKVDKKVEPKSCDKTHTCPPCPAPEAAGGPSVFLFPPKPKDTLMISRTPEVTCVVVDVSHEDPEVKFNWYVDGVEVHNAKTKPREEQYNSTYRVVSVLTVLHQDWLNGKEYKCKVSNKALGAPIEKTISKAKGQPREPQVCTLPPSRDELTKNQVSLSCAVKGFYPSDIAVEWESNGQPENNYKTTPPVLDSDGSFFLVSKLTVDKSRWQQGNVFSCSVMHEALHNHYTQKSLSLSPGK

SEQ ID NO: 322 - protein, 214 aa, Artificial Sequence; identical to SEQ ID NO: 319
  LC CD3 CH2527 (Crossfab, VL-CH1)

SEQ ID NO: 323 - protein, 694 aa, Artificial Sequence
  CEA CH1A1A 98/99 - CD3 CH2527 (Crossfab VH-Ck) - Fc(knob) P329GLALA
QVQLVQSGAEVKKPGASVKVSCKASGYTFTEFGMNWVRQAPGQGLEWMGWINTKTGEATYVEEFKGRVTFTTDTSTSTAYMELRSLRSDDTAVYYCARWDFAYYVEAMDYWGQGTTVTVSSASTKGPSVFPLAPSSKSTSGGTAALGCLVKDYFPEPVTVSWNSGALTSGVHTFPAVLQSSGLYSLSSVVTVPSSSLGTQTYICNVNHKPSNTKVDKKVEPKSCDGGGGSGGGGSEVQLLESGGGLVQPGGSLRLSCAASGFTFSTYAMNWVRQAPGKGLEWVSRIRSKYNNYATYYADSVKGRFTISRDDSKNTLYLQMNSLRAEDTAVYYCVRHGNFGNSYVSWFAYWGQGTLVTVSSASVAAPSVFIFPPSDEQLKSGTASVVCLLNNFYPREAKVQWKVDNALQSGNSQESVTEQDSKDSTYSLSSTLTLSKADYEKHKVYACEVTHQGLSSPVTKSFNRGECDKTHTCPPCPAPEAAGGPSVFLFPPKPKDTLMISRTPEVTCVVVDVSHEDPEVKFNWYVDGVEVHNAKTKPREEQYNSTYRVVSVLTVLHQDWLNGKEYKCKVSNKALGAPIEKTISKAKGQPREPQVYTLPPCRDELTKNQVSLWCLVKGFYPSDIAVEWESNGQPENNYKTTPPVLDSDGSFFLYSKLTVDKSRWQQGNVFSCSVMHEALHNHYTQKSLSLSPGK

SEQ ID NO: 324 - protein, 451 aa, Artificial Sequence; identical to SEQ ID NO: 65
  CEA CH1A1A 98/99 (VH-CH1) - Fc(hole) P329GLALA

SEQ ID NO: 325 - protein, 215 aa, Artificial Sequence
  LC DP47 GS
EIVLTQSPGTLSLSPGERATLSCRASQSVSSSYLAWYQQKPGQAPRLLIYGASSRATGIPDRFSGSGSGTDFTLTISRLEPEDFAVYYCQQYGSSPLTFGQGTKVEIKRTVAAPSVFIFPPSDEQLKSGTASVVCLLNNFYPREAKVQWKVDNALQSGNSQESVTEQDSKDSTYSLSSTLTLSKADYEKHKVYACEVTHQGLSSPVTKSFNRGEC

SEQ ID NO: 326 - protein, 214 aa, Artificial Sequence; identical to SEQ ID NO: 319
  LC CD3 CH2527 (Crossfab, VL-CH1)

SEQ ID NO: 327 - protein, 688 aa, Artificial Sequence
  DP47 GS (VH-CH1) - CD3 CH2527 (Crossfab VH-Ck) - Fc(knob) P329GLALA
EVQLLESGGGLVQPGGSLRLSCAASGFTFSSYAMSWVRQAPGKGLEWVSAISGSGGSTYYADSVKGRFTISRDNSKNTLYLQMNSLRAEDTAVYYCAKGSGFDYWGQGTLVTVSSASTKGPSVFPLAPSSKSTSGGTAALGCLVKDYFPEPVTVSWNSGALTSGVHTFPAVLQSSGLYSLSSVVTVPSSSLGTQTYICNVNHKPSNTKVDKKVEPKSCDGGGGSGGGGSEVQLLESGGGLVQPGGSLRLSCAASGFTFSTYAMNWVRQAPGKGLEWVSRIRSKYNNYATYYADSVKGRFTISRDDSKNTLYLQMNSLRAEDTAVYYCVRHGNFGNSYVSWFAYWGQGTLVTVSSASVAAPSVFIFPPSDEQLKSGTASVVCLLNNFYPREAKVQWKVDNALQSGNSQESVTEQDSKDSTYSLSSTLTLSKADYEKHKVYACEVTHQGLSSPVTKSFNRGECDKTHTCPPCPAPEAAGGPSVFLFPPKPKDTLMISRTPEVTCVVVDVSHEDPEVKFNWYVDGVEVHNAKTKPREEQYNSTYRVVSVLTVLHQDWLNGKEYKCKVSNKALGAPIEKTISKAKGQPREPQVYTLPPCRDELTKNQVSLWCLVKGFYPSDIAVEWESNGQPENNYKTTPPVLDSDGSFFLYSKLTVDKSRWQQGNVFSCSVMHEALHNHYTQKSLSLSPGK

SEQ ID NO: 328 - protein, 445 aa, Artificial Sequence
  DP47 GS (VH-CH1) - Fc(hole) P329GLALA
EVQLLESGGGLVQPGGSLRLSCAASGFTFSSYAMSWVRQAPGKGLEWVSAISGSGGSTYYADSVKGRFTISRDNSKNTLYLQMNSLRAEDTAVYYCAKGSGFDYWGQGTLVTVSSASTKGPSVFPLAPSSKSTSGGTAALGCLVKDYFPEPVTVSWNSGALTSGVHTFPAVLQSSGLYSLSSVVTVPSSSLGTQTYICNVNHKPSNTKVDKKVEPKSCDKTHTCPPCPAPEAAGGPSVFLFPPKPKDTLMISRTPEVTCVVVDVSHEDPEVKFNWYVDGVEVHNAKTKPREEQYNSTYRVVSVLTVLHQDWLNGKEYKCKVSNKALGAPIEKTISKAKGQPREPQVCTLPPSRDELTKNQVSLSCAVKGFYPSDIAVEWESNGQPENNYKTTPPVLDSDGSFFLVSKLTVDKSRWQQGNVFSCSVMHEALHNHYTQKSLSLSPGK

SEQ ID NO: 329 - DNA, 1365 bp, Artificial Sequence
  HC CD3 CH2527 (VH_3-23(12))
gaggtgcagctgctggaatctggcggcggactggtgcagcctggcggatctctgagactgagctgtgccgccagcggcttcaccttcagcacctacgccatgaactgggtgcgccaggcccctggcaaaggcctggaatgggtgtcccggatcagaagcaagtacaacaactacgccacctactacgccgacagcgtgaagggccggttcaccatcagccgggacgacagcaagaacaccctgtacctgcagatgaacagcctgcgggccgaggacaccgccgtgtactattgtgtgcggcacggcaacttcggcaacagctatgtgtcttggtttgcctactggggccagggcaccctcgtgaccgtgtcatctgctagcaccaagggcccatcggtcttccccctggcaccctcctccaagagcacctctgggggcacagcggccctgggctgcctggtcaaggactacttccccgaaccggtgacggtgtcgtggaactcaggcgccctgaccagcggcgtgcacaccttcccggctgtcctacagtcctcaggactctactccctcagcagcgtggtgaccgtgccctccagcagcttgggcacccagacctacatctgcaacgtgaatcacaagcccagcaacaccaaggtggacaagaaagttgagcccaaatcttgtgacaaaactcacacatgcccaccgtgcccagcacctgaactcctggggggaccgtcagtcttcctcttccccccaaaacccaaggacaccctcatgatctcccggacccctgaggtcacatgcgtggtggtggacgtgagccacgaagaccctgaggtcaagttcaactggtacgtggacggcgtggaggtgcataatgccaagacaaagccgcgggaggagcagtacaacagcacgtaccgtgtggtcagcgtcctcaccgtcctgcaccaggactggctgaatggcaaggagtacaagtgcaaggtctccaacaaagccctcccagcccccatcgagaaaaccatctccaaagccaaagggcagccccgagaaccacaggtgtacaccctgcccccatcccgggatgagctgaccaagaaccaggtcagcctgacctgcctggtcaaaggcttctatcccagcgacatcgccgtggagtgggagagcaatgggcagccggagaacaactacaagaccacgcctcccgtgctggactccgacggctccttcttcctctacagcaagctcaccgtggacaagagcaggtggcagcaggggaacgtcttctcatgctccgtgatgcatgaggctctgcacaaccactacacgcagaagagcctctccctgtctccgggtaaa

SEQ ID NO: 330 - DNA, 645 bp, Artificial Sequence
  LC CD3 CH2527 (VL_7-46(13))
caggccgtcgtgacccaggaacccagcctgacagtgtctcctggcggcaccgtgaccctgacatgtggcagttctacaggcgccgtgaccaccagcaactacgccaactgggtgcaggaaaagcccggccaggccttcagaggactgatcggcggcaccaacaagagagcccctggcacccctgccagattcagcggatctctgctgggaggaaaggccgccctgacactgtctggcgcccagccagaagatgaggccgagtactactgcgccctgtggtacagcaacctgtgggtgttcggcggaggcaccaagctgacagtcctaggtcaacccaaggctgcccccagcgtgaccctgttcccccccagcagcgaggaactgcaggccaacaaggccaccctggtctgcctgatcagcgacttctacccaggcgccgtgaccgtggcctggaaggccgacagcagccccgtgaaggccggcgtggagaccaccacccccagcaagcagagcaacaacaagtacgccgccagcagctacctgagcctgacccccgagcagtggaagagccacaggtcctacagctgccaggtgacccacgagggcagcaccgtggagaaaaccgtggcccccaccgagtgcagc

SEQ ID NO: 331 - DNA, 375 bp, Artificial Sequence
  VH CD3 CH2527 (VH_3-23(12))
gaggtgcagctgctggaatctggcggcggactggtgcagcctggcggatctctgagactgagctgtgccgccagcggcttcaccttcagcacctacgccatgaactgggtgcgccaggcccctggcaaaggcctggaatgggtgtcccggatcagaagcaagtacaacaactacgccacctactacgccgacagcgtgaagggccggttcaccatcagccgggacgacagcaagaacaccctgtacctgcagatgaacagcctgcgggccgaggacaccgccgtgtactattgtgtgcggcacggcaacttcggcaacagctatgtgtcttggtttgcctactggggccagggcaccctcgtgaccgtgtcatct

SEQ ID NO: 332 - DNA, 15 bp, Artificial Sequence
  HCDR1 CD3 CH2527 (VH_3-23(12))
acctacgccatgaac

SEQ ID NO: 333 - DNA, 57 bp, Artificial Sequence
  HCDR2 CD3 CH2527 (VH_3-23(12))
cggatcagaagcaagtacaacaactacgccacctactacgccgacagcgtgaagggc

SEQ ID NO: 334 - DNA, 42 bp, Artificial Sequence; identical to SEQ ID NO: 254
  HCDR3 CD3 CH2527 (VH_3-23(12))

SEQ ID NO: 335 - DNA, 327 bp, Artificial Sequence
  VL CD3 CH2527 (VL_7-46(13))
caggccgtcgtgacccaggaacccagcctgacagtgtctcctggcggcaccgtgaccctgacatgtggcagttctacaggcgccgtgaccaccagcaactacgccaactgggtgcaggaaaagcccggccaggccttcagaggactgatcggcggcaccaacaagagagcccctggcacccctgccagattcagcggatctctgctgggaggaaaggccgccctgacactgtctggcgcccagccagaagatgaggccgagtactactgcgccctgtggtacagcaacctgtgggtgttcggcggaggcaccaagctgacagtccta

SEQ ID NO: 336 - DNA, 42 bp, Artificial Sequence
  LCDR1 CD3 CH2527 (VL_7-46(13))
ggcagttctacaggcgccgtgaccaccagcaactacgccaac

SEQ ID NO: 337 - DNA, 21 bp, Artificial Sequence
  LCDR2 CD3 CH2527 (VL_7-46(13))
ggcaccaacaagagagcccct

SEQ ID NO: 338 - DNA, 27 bp, Artificial Sequence
  LCDR3 CD3 CH2527 (VL_7-46(13))
gccctgtggtacagcaacctgtgggtg

SEQ ID NO: 339 - DNA, 1326 bp, Artificial Sequence
  HC MCSP M4-3 (C1)
caggtgcaattgcaggaaagcggccctggcctggtcaagcccagccagaccctgagcctgacctgcaccgtgtccggcggcagcatcaccagcggctattattggaactggattcggcagcaccccggcaagggcctggaatggatcggctacatcactttcgacggctctaacaactacaaccccagcctgaagtccagagtgaccatcagccgggacaccagcaagaaccagttcagcctgaagctgtccagcgtgacagccgccgacaccgccgtgtactactgcgccgacttcgactactggggccagggcaccctggtcaccgtgtccagcgctagcaccaagggcccatcggtcttccccctggcaccctcctccaagagcacctctgggggcacagcggccctgggctgcctggtcaaggactacttccccgaaccggtgacggtgtcgtggaactcaggcgccctgaccagcggcgtgcacaccttcccggctgtcctacagtcctcaggactctactccctcagcagcgtggtgaccgtgccctccagcagcttgggcacccagacctacatctgcaacgtgaatcacaagcccagcaacaccaaggtggacaagaaagttgagcccaaatcttgtgacaaaactcacacatgcccaccgtgcccagcacctgaactcctggggggaccgtcagtcttcctcttccccccaaaacccaaggacaccctcatgatctcccggacccctgaggtcacatgcgtggtggtggacgtgagccacgaagaccctgaggtcaagttcaactggtacgtggacggcgtggaggtgcataatgccaagacaaagccgcgggaggagcagtacaacagcacgtaccgtgtggtcagcgtcctcaccgtcctgcaccaggactggctgaatggcaaggagtacaagtgcaaggtctccaacaaagccctcccagcccccatcgagaaaaccatctccaaagccaaagggcagccccgagaaccacaggtgtacaccctgcccccatcccgggatgagctgaccaagaaccaggtcagcctgacctgcctggtcaaaggcttctatcccagcgacatcgccgtggagtgggagagcaatgggcagccggagaacaactacaagaccacgcctcccgtgctggactccgacggctccttcttcctctacagcaagctcaccgtggacaagagcaggtggcagcaggggaacgtcttctcatgctccgtgatgcatgaggctctgcacaaccactacacgcagaagagcctctccctgtctccgggtaaa

SEQ ID NO: 340 - DNA, 642 bp, Artificial Sequence
  LC MCSP ML2 (G3)
gacatccagatgacccagagccccagcagcctgagcgccagcgtgggcgacagagtgaccatcacctgccgggccagccagggcatccggaactacctgaactggtatcagcagaagcccggcaaggcccccaagctgctgatctactacaccagcagcctgcacagcggcgtgcctagccggtttagcggcagcggctccggcaccgactacaccctgaccattagctccctgcagcccgaggacttcgccacctactactgccagcagtactctgctctgccgtggaccttcggccagggaacaaaggtggagatcaagcgtacggtggctgcaccatctgtcttcatcttcccgccatctgatgagcagttgaaatctggaactgcctctgttgtgtgcctgctgaataacttctatcccagagaggccaaagtacagtggaaggtggataacgccctccaatcgggtaactcccaggagagtgtcacagagcaggacagcaaggacagcacctacagcctcagcagcaccctgacgctgagcaaagcagactacgagaaacacaaagtctacgcctgcgaagtcacccatcagggcctgagctcgcccgtcacaaagagcttcaacaggggagagtgt

SEQ ID NO: 341 - DNA, 336 bp, Artificial Sequence
  VH MCSP M4-3 (C1)
caggtgcaattgcaggaaagcggccctggcctggtcaagcccagccagaccctgagcctgacctgcaccgtgtccggcggcagcatcaccagcggctattattggaactggattcggcagcaccccggcaagggcctggaatggatcggctacatcactttcgacggctctaacaactacaaccccagcctgaagtccagagtgaccatcagccgggacaccagcaagaaccagttcagcctgaagctgtccagcgtgacagccgccgacaccgccgtgtactactgcgccgacttcgactactggggccagggcaccctggtcaccgtgtccagc

SEQ ID NO: 342 - DNA, 18 bp, Artificial Sequence
  HCDR1 MCSP M4-3 (C1)
agcggctattattggaac

SEQ ID NO: 343 - DNA, 48 bp, Artificial Sequence
  HCDR2 MCSP M4-3 (C1)
tacatcactttcgacggctctaacaactacaaccccagcctgaagtcc

SEQ ID NO: 344 - DNA, 9 bp, Artificial Sequence
  HCDR3 MCSP M4-3 (C1)
ttcgactac

SEQ ID NO: 345 - DNA, 321 bp, Artificial Sequence
  VL MCSP ML2 (G3)
gacatccagatgacccagagccccagcagcctgagcgccagcgtgggcgacagagtgaccatcacctgccgggccagccagggcatccggaactacctgaactggtatcagcagaagcccggcaaggcccccaagctgctgatctactacaccagcagcctgcacagcggcgtgcctagccggtttagcggcagcggctccggcaccgactacaccctgaccattagctccctgcagcccgaggacttcgccacctactactgccagcagtactctgctctgccgtggaccttcggccagggaacaaaggtggagatcaag

SEQ ID NO: 346 - DNA, 33 bp, Artificial Sequence; identical to SEQ ID NO: 242
  LCDR1 MCSP ML2 (G3)

SEQ ID NO: 347 - DNA, 21 bp, Artificial Sequence
  LCDR2 MCSP ML2 (G3)
tacaccagcagcctgcacagc

SEQ ID NO: 348 - DNA, 27 bp, Artificial Sequence
  LCDR3 MCSP ML2 (G3)
cagcagtactctgctctgccgtggacc

SEQ ID NO: 349 - DNA, 1353 bp, Artificial Sequence
  HC CEA CH1A1A 98-99
caggtgcagctggtgcagtctggcgccgaagtgaagaaacctggagctagtgtgaaggtgtcctgcaaggccagcggctacaccttcaccgagttcggcatgaactgggtccgacaggctccaggccagggcctcgaatggatgggctggatcaacaccaagaccggcgaggccacctacgtggaagagttcaagggcagagtgaccttcaccacggacaccagcaccagcaccgcctacatggaactgcggagcctgagaagcgacgacaccgccgtgtactactgcgccagatgggacttcgcctattacgtggaagccatggactactggggccagggcaccaccgtgaccgtgtctagcgctagcaccaagggcccatcggtcttccccctggcaccctcctccaagagcacctctgggggcacagcggccctgggctgcctggtcaaggactacttccccgaaccggtgacggtgtcgtggaactcaggcgccctgaccagcggcgtgcacaccttcccggctgtcctacagtcctcaggactctactccctcagcagcgtggtgaccgtgccctccagcagcttgggcacccagacctacatctgcaacgtgaatcacaagcccagcaacaccaaggtggacaagaaagttgagcccaaatcttgtgacaaaactcacacatgcccaccgtgcccagcacctgaactcctggggggaccgtcagtcttcctcttccccccaaaacccaaggacaccctcatgatctcccggacccctgaggtcacatgcgtggtggtggacgtgagccacgaagaccctgaggtcaagttcaactggtacgtggacggcgtggaggtgcataatgccaagacaaagccgcgggaggagcagtacaacagcacgtaccgtgtggtcagcgtcctcaccgtcctgcaccaggactggctgaatggcaaggagtacaagtgcaaggtctccaacaaagccctcccagcccccatcgagaaaaccatctccaaagccaaagggcagccccgagaaccacaggtgtacaccctgcccccatcccgggatgagctgaccaagaaccaggtcagcctgacctgcctggtcaaaggcttctatcccagcgacatcgccgtggagtgggagagcaatgggcagccggagaacaactacaagaccacgcctcccgtgctggactccgacggctccttcttcctctacagcaagctcaccgtggacaagagcaggtggcagcaggggaacgtcttctcatgctccgtgatgcatgaggctctgcacaaccactacacgcagaagagcctctccctgtctccgggtaaa

SEQ ID NO: 350 - DNA, 645 bp, Artificial Sequence
  LC CEA 2F1
gatatccagatgacccagtctccatcctccctgtctgcatctgtgggagacagagtcaccatcacttgcaaggccagtgcggctgtgggtacgtatgttgcgtggtatcagcagaaaccagggaaagcacctaagctcctgatctattcggcatcctaccgcaaaaggggagtcccatcaaggttcagtggcagtggatctgggacagatttcactctcaccatcagcagtctgcaacctgaagatttcgcaacttactactgtcaccaatattacacctatcctctattcacgtttggccagggcaccaagctcgagatcaagcgtacggtggctgcaccatctgtcttcatcttcccgccatctgatgagcagttgaaatctggaactgcctctgttgtgtgcctgctgaataacttctatcccagagaggccaaagtacagtggaaggtggataacgccctccaatcgggtaactcccaggagagtgtcacagagcaggacagcaaggacagcacctacagcctcagcagcaccctgacgctgagcaaagcagactacgagaaacacaaagtctacgcctgcgaagtcacccatcagggcctgagctcgcccgtcacaaagagcttcaacaggggagagtgt

SEQ ID NO: 351 - DNA, 363 bp, Artificial Sequence; identical to SEQ ID NO: 124
  VH CEA CH1A1A 98-99

SEQ ID NO: 352 - DNA, 15 bp, Artificial Sequence
  HCDR1 CEA CH1A1A 98-99
gagttcggcatgaac

SEQ ID NO: 353 - DNA, 51 bp, Artificial Sequence; identical to SEQ ID NO: 120
  HCDR2 CEA CH1A1A 98-99

SEQ ID NO: 354 - DNA, 36 bp, Artificial Sequence; identical to SEQ ID NO: 122
  HCDR3 CEA CH1A1A 98-99

SEQ ID NO: 355 - DNA, 324 bp, Artificial Sequence; identical to SEQ ID NO: 132
  VL CEA 2F1

SEQ ID NO: 356 - DNA, 33 bp, Artificial Sequence; identical to SEQ ID NO: 126
  LCDR1 CEA 2F1

SEQ ID NO: 357 - DNA, 21 bp, Artificial Sequence
  LCDR2 CEA 2F1
tcggcatcctaccgcaaaagg

SEQ ID NO: 358 - DNA, 30 bp, Artificial Sequence; identical to SEQ ID NO: 130
  LCDR3 CEA 2F1

SEQ ID NO: 359 - DNA, 642 bp, Artificial Sequence
  LC CD3 CH2527 (Crossfab, VL-CH1)
caggccgtcgtgacccaggaacccagcctgacagtgtctcctggcggcaccgtgaccctgacatgtggcagttctacaggcgccgtgaccaccagcaactacgccaactgggtgcaggaaaagcccggccaggccttcagaggactgatcggcggcaccaacaagagagcccctggcacccctgccagattcagcggatctctgctgggaggaaaggccgccctgacactgtctggcgcccagccagaagatgaggccgagtactactgcgccctgtggtacagcaacctgtgggtgttcggcggaggcaccaagctgacagtgctgagcagcgcttccaccaaaggcccttccgtgtttcctctggctcctagctccaagtccacctctggaggcaccgctgctctcggatgcctcgtgaaggattattttcctgagcctgtgacagtgtcctggaatagcggagcactgacctctggagtgcatactttccccgctgtgctgcagtcctctggactgtacagcctgagcagcgtggtgacagtgcccagcagcagcctgggcacccagacctacatctgcaacgtgaaccacaagcccagcaacaccaaggtggacaagaaggtggaacccaagtcttgt

SEQ ID NO: 360 - DNA, 2055 bp, Artificial Sequence
  MCSP M4-3 (C1) (VH-CH1) - CD3 CH2527 (Crossfab VH-Ck) - Fc(knob) P329GLALA
caggtgcaattgcaggaaagcggccctggcctggtcaagcccagccagaccctgagcctgacctgcaccgtgtccggcggcagcatcaccagcggctattattggaactggattcggcagcaccccggcaagggcctggaatggatcggctacatcactttcgacggctctaacaactacaaccccagcctgaagtccagagtgaccatcagccgggacaccagcaagaaccagttcagcctgaagctgtccagcgtgacagccgccgacaccgccgtgtactactgcgccgacttcgactactggggccagggcaccctggtcaccgtgtccagcgctagcacaaagggccccagcgtgttccctctggcccctagcagcaagagcacatctggcggaacagccgccctgggctgcctcgtgaaggactactttcccgagcctgtgaccgtgtcctggaactctggcgccctgacaagcggcgtgcacacctttccagccgtgctgcagagcagcggcctgtactctctgagcagcgtggtcaccgtgcctagcagcagcctgggcacccagacctacatctgcaacgtgaaccacaagcccagcaacaccaaagtggacaagaaggtggagcccaagagctgtgatggcggaggagggtccggaggcggaggatccgaggtgcagctgctggaatctggcggcggactggtgcagcctggcggatctctgagactgagctgtgccgccagcggcttcaccttcagcacctacgccatgaactgggtgcgccaggcccctggcaaaggcctggaatgggtgtcccggatcagaagcaagtacaacaactacgccacctactacgccgacagcgtgaagggccggttcaccatcagccgggacgacagcaagaacaccctgtacctgcagatgaacagcctgcgggccgaggacaccgccgtgtactattgtgtgcggcacggcaacttcggcaacagctatgtgtcttggtttgcctactggggccagggcaccctcgtgaccgtgtcaagcgctagcgtggccgctccctccgtgtttatctttcccccatccgatgaacagctgaaaagcggcaccgcctccgtcgtgtgtctgctgaacaatttttaccctagggaagctaaagtgcagtggaaagtggataacgcactgcagtccggcaactcccaggaatctgtgacagaacaggactccaaggacagcacctactccctgtcctccaccctgacactgtctaaggctgattatgagaaacacaaagtctacgcctgcgaagtcacccatcagggcctgagctcgcccgtcacaaagagcttcaacaggggagagtgtgacaagacccacacctgtcccccttgtcctgcccctgaagctgctggcggcccttctgtgttcctgttccccccaaagcccaaggacaccctgatgatcagccggacccccgaagtgacctgcgtggtggtggatgtgtcccacgaggaccctgaagtgaagttcaattggtacgtggacggcgtggaagtgcacaacgccaagacaaagccgcgggaggagcagtacaacagcacgtaccgtgtggtcagcgtcctcaccgtcctgcaccaggactggctgaatggcaaggagtacaagtgcaaggtctccaacaaagccctcggcgcccccatcgagaaaaccatctccaaagccaaagggcagccccgagaaccacaggtgtacaccctgcccccatgccgggatgagctgaccaagaaccaggtcagcctgtggtgcctggtcaaaggcttctatcccagcgacatcgccgtggagtgggagagcaatgggcagccggagaacaactacaagaccacgcctcccgtgctggactccgacggctccttcttcctctacagcaagctcaccgtggacaagagcaggtggcagcaggggaacgtcttctcatgctccgtgatgcatgaggctctgcacaaccactacacgcagaagagcctctccctgtctccgggtaaa

SEQ ID NO: 361 - DNA, 1326 bp, Artificial Sequence
  MCSP M4-3 (C1) (VH-CH1) - Fc(hole) P329GLALA
caggtgcaattgcaggaaagcggccctggcctggtcaagcccagccagaccctgagcctgacctgcaccgtgtccggcggcagcatcaccagcggctattattggaactggattcggcagcaccccggcaagggcctggaatggatcggctacatcactttcgacggctctaacaactacaaccccagcctgaagtccagagtgaccatcagccgggacaccagcaagaaccagttcagcctgaagctgtccagcgtgacagccgccgacaccgccgtgtactactgcgccgacttcgactactggggccagggcaccctggtcaccgtgtccagcgctagcaccaagggcccctccgtgttccccctggcccccagcagcaagagcaccagcggcggcacagccgctctgggctgcctggtcaaggactacttccccgagcccgtgaccgtgtcctggaacagcggagccctgacctccggcgtgcacaccttccccgccgtgctgcagagttctggcctgtatagcctgagcagcgtggtcaccgtgccttctagcagcctgggcacccagacctacatctgcaacgtgaaccacaagcccagcaacaccaaggtggacaagaaggtggagcccaagagctgcgacaaaactcacacatgcccaccgtgcccagcacctgaagctgcagggggaccgtcagtcttcctcttccccccaaaacccaaggacaccctcatgatctcccggacccctgaggtcacatgcgtggtggtggacgtgagccacgaagaccctgaggtcaagttcaactggtacgtggacggcgtggaggtgcataatgccaagacaaagccgcgggaggagcagtacaacagcacgtaccgtgtggtcagcgtcctcaccgtcctgcaccaggactggctgaatggcaaggagtacaagtgcaaggtctccaacaaagccctcggcgcccccatcgagaaaaccatctccaaagccaaagggcagccccgagaaccacaggtgtgcaccctgcccccatcccgggatgagctgaccaagaaccaggtcagcctctcgtgcgcagtcaaaggcttctatcccagcgacatcgccgtggagtgggagagcaatgggcagccggagaacaactacaagaccacgcctcccgtgctggactccgacggctccttcttcctcgtgagcaagctcaccgtggacaagagcaggtggcagcaggggaacgtcttctcatgctccgtgatgcatgaggctctgcacaaccactacacgcagaagagcctctccctgtctccgggtaaa

SEQ ID NO: 362 - DNA, 642 bp, Artificial Sequence; identical to SEQ ID NO: 359
  LC CD3 CH2527 (Crossfab, VL-CH1)

SEQ ID NO: 363 - DNA, 2082 bp, Artificial Sequence
  CEA CH1A1A 98/99 - CD3 CH2527 (Crossfab VH-Ck) - Fc(knob) P329GLALA
caggtgcagctggtgcagtctggcgccgaagtgaagaaacctggcgccagcgtgaaggtgtcctgcaaggccagcggctacaccttcaccgagttcggcatgaactgggtccgacaggcccctggacagggcctggaatggatgggctggatcaacaccaagaccggcgaggccacctacgtggaagagttcaagggcagagtgaccttcaccaccgacaccagcaccagcaccgcctacatggaactgcggagcctgagaagcgacgacaccgccgtgtactactgcgccagatgggacttcgcctactatgtggaagccatggactactggggccagggcaccaccgtgaccgtgtctagtgctagcacaaagggccccagcgtgttccctctggcccctagcagcaagagcacatctggcggaacagccgccctgggctgcctggtcaaggactactttcccgagcccgtgacagtgtcctggaactctggcgccctgacaagcggcgtgcacacctttccagccgtgctgcagagcagcggcctgtactctctgagcagcgtggtcaccgtgcctagctctagcctgggcacccagacctacatctgcaacgtgaaccacaagcccagcaacaccaaggtggacaagaaggtggaacccaagagctgcgatggcggaggcggctccggaggcggaggatccgaggtgcagctgctggaatctggcggcggactggtgcagcctggcggatctctgagactgagctgtgccgccagcggcttcaccttcagcacctacgccatgaactgggtgcgccaggcccctggcaaaggcctggaatgggtgtcccggatcagaagcaagtacaacaactacgccacctactacgccgacagcgtgaagggccggttcaccatcagccgggacgacagcaagaacaccctgtacctgcagatgaacagcctgcgggccgaggacaccgccgtgtactattgtgtgcggcacggcaacttcggcaacagctatgtgtcttggtttgcctactggggccagggcaccctcgtgaccgtgtcaagcgctagcgtggccgctccctccgtgtttatctttcccccatccgatgaacagctgaaaagcggcaccgcctccgtcgtgtgtctgctgaacaatttttaccctagggaagctaaagtgcagtggaaagtggataacgcactgcagtccggcaactcccaggaatctgtgacagaacaggactccaaggacagcacctactccctgtcctccaccctgacactgtctaaggctgattatgagaaacacaaagtctacgcctgcgaagtcacccatcagggcctgagctcgcccgtcacaaagagcttcaacaggggagagtgtgacaagacccacacctgtcccccttgtcctgcccctgaagctgctggcggcccttctgtgttcctgttccccccaaagcccaaggacaccctgatgatcagccggacccccgaagtgacctgcgtggtggtggatgtgtcccacgaggaccctgaagtgaagttcaattggtacgtggacggcgtggaagtgcacaacgccaagacaaagccgcgggaggagcagtacaacagcacgtaccgtgtggtcagcgtcctcaccgtcctgcaccaggactggctgaatggcaaggagtacaagtgcaaggtctccaacaaagccctcggcgcccccatcgagaaaaccatctccaaagccaaagggcagccccgagaaccacaggtgtacaccctgcccccatgccgggatgagctgaccaagaaccaggtcagcctgtggtgcctggtcaaaggcttctatcccagcgacatcgccgtggagtgggagagcaatgggcagccggagaacaactacaagaccacgcctcccgtgctggactccgacggctccttcttcctctacagcaagctcaccgtggacaagagcaggtggcagcaggggaacgtcttctcatgctccgtgatgcatgaggctctgcacaaccactacacgcagaagagcctctccctgtctccgggtaaa

SEQ ID NO: 364 - DNA, 1353 bp, Artificial Sequence
  CEA CH1A1A 98/99 (VH-CH1) - Fc(hole) P329GLALA
caggtgcagctggtgcagtctggcgccgaagtgaagaaacctggagctagtgtgaaggtgtcctgcaaggccagcggctacaccttcaccgagttcggcatgaactgggtccgacaggctccaggccagggcctcgaatggatgggctggatcaacaccaagaccggcgaggccacctacgtggaagagttcaagggcagagtgaccttcaccacggacaccagcaccagcaccgcctacatggaactgcggagcctgagaagcgacgacaccgccgtgtactactgcgccagatgggacttcgcctattacgtggaagccatggactactggggccagggcaccaccgtgaccgtgtctagcgctagcaccaagggcccctccgtgttccccctggcccccagcagcaagagcaccagcggcggcacagccgctctgggctgcctggtcaaggactacttccccgagcccgtgaccgtgtcctggaacagcggagccctgacctccggcgtgcacaccttccccgccgtgctgcagagttctggcctgtatagcctgagcagcgtggtcaccgtgccttctagcagcctgggcacccagacctacatctgcaacgtgaaccacaagcccagcaacaccaaggtggacaagaaggtggagcccaagagctgcgacaaaactcacacatgcccaccgtgcccagcacctgaagctgcagggggaccgtcagtcttcctcttccccccaaaacccaaggacaccctcatgatctcccggacccctgaggtcacatgcgtggtggtggacgtgagccacgaagaccctgaggtcaagttcaactggtacgtggacggcgtggaggtgcataatgccaagacaaagccgcgggaggagcagtacaacagcacgtaccgtgtggtcagcgtcctcaccgtcctgcaccaggactggctgaatggcaaggagtacaagtgcaaggtctccaacaaagccctcggcgcccccatcgagaaaaccatctccaaagccaaagggcagccccgagaaccacaggtgtgcaccctgcccccatcccgggatgagctgaccaagaaccaggtcagcctctcgtgcgcagtcaaaggcttctatcccagcgacatcgccgtggagtgggagagcaatgggcagccggagaacaactacaagaccacgcctcccgtgctggactccgacggctccttcttcctcgtgagcaagctcaccgtggacaagagcaggtggcagcaggggaacgtcttctcatgctccgtgatgcatgaggctctgcacaaccactacacgcagaagagcctctccctgtctccgggtaaa

SEQ ID NO: 365 - DNA, 645 bp, Artificial Sequence
  LC DP47 GS
gaaatcgtgttaacgcagtctccaggcaccctgtctttgtctccaggggaaagagccaccctctcttgcagggccagtcagagtgttagcagcagctacttagcctggtaccagcagaaacctggccaggctcccaggctcctcatctatggagcatccagcagggccactggcatcccagacaggttcagtggcagtggatccgggacagacttcactctcaccatcagcagactggagcctgaagattttgcagtgtattactgtcagcagtatggtagctcaccgctgacgttcggccaggggaccaaagtggaaatcaaacgtacggtggctgcaccatctgtcttcatcttcccgccatctgatgagcagttgaaatctggaactgcctctgttgtgtgcctgctgaataacttctatcccagagaggccaaagtacagtggaaggtggataacgccctccaatcgggtaactcccaggagagtgtcacagagcaggacagcaaggacagcacctacagcctcagcagcaccctgacgctgagcaaagcagactacgagaaacacaaagtctacgcctgcgaagtcacccatcagggcctgagctcgcccgtcacaaagagcttcaacaggggagagtgt

SEQ ID NO: 366 - DNA, 642 bp, Artificial Sequence; identical to SEQ ID NO: 359
  LC CD3 CH2527 (Crossfab, VL-CH1)

SEQ ID NO: 367 - DNA, 2064 bp, Artificial Sequence
  DP47 GS (VH-CH1) - CD3 CH2527 (Crossfab VH-Ck) - Fc(knob) P329GLALA
gaggtgcaattgttggagtctgggggaggcttggtacagcctggggggtccctgagactctcctgtgcagcctccggattcacctttagcagttatgccatgagctgggtccgccaggctccagggaaggggctggagtgggtctcagctattagtggtagtggtggtagcacatactacgcagactccgtgaagggccggttcaccatctccagagacaattccaagaacacgctgtatctgcagatgaacagcctgagagccgaggacacggccgtatattactgtgcgaaaggcagcggatttgactactggggccaaggaaccctggtcaccgtctcgagtgctagcacaaagggccccagcgtgttccctctggcccctagcagcaagagcacatctggcggaacagccgccctgggctgcctcgtgaaggactactttcccgagcctgtgaccgtgtcctggaactctggcgccctgacaagcggcgtgcacacctttccagccgtgctgcagagcagcggcctgtactctctgagcagcgtggtcaccgtgcctagcagcagcctgggcacccagacctacatctgcaacgtgaaccacaagcccagcaacaccaaagtggacaagaaggtggagcccaagagctgtgatggcggaggagggtccggaggcggaggatccgaggtgcagctgctggaatctggcggcggactggtgcagcctggcggatctctgagactgagctgtgccgccagcggcttcaccttcagcacctacgccatgaactgggtgcgccaggcccctggcaaaggcctggaatgggtgtcccggatcagaagcaagtacaacaactacgccacctactacgccgacagcgtgaagggccggttcaccatcagccgggacgacagcaagaacaccctgtacctgcagatgaacagcctgcgggccgaggacaccgccgtgtactattgtgtgcggcacggcaacttcggcaacagctatgtgtcttggtttgcctactggggccagggcaccctcgtgaccgtgtcaagcgctagcgtggccgctccctccgtgtttatctttcccccatccgatgaacagctgaaaagcggcaccgcctccgtcgtgtgtctgctgaacaatttttaccctagggaagctaaagtgcagtggaaagtggataacgcactgcagtccggcaactcccaggaatctgtgacagaacaggactccaaggacagcacctactccctgtcctccaccctgacactgtctaaggctgattatgagaaacacaaagtctacgcctgcgaagtcacccatcagggcctgagctcgcccgtcacaaagagcttcaacaggggagagtgtgacaagacccacacctgtcccccttgtcctgcccctgaagctgctggcggcccttctgtgttcctgttccccccaaagcccaaggacaccctgatgatcagccggacccccgaagtgacctgcgtggtggtggatgtgtcccacgaggaccctgaagtgaagttcaattggtacgtggacggcgtggaagtgcacaacgccaagacaaagccgcgggaggagcagtacaacagcacgtaccgtgtggtcagcgtcctcaccgtcctgcaccaggactggctgaatggcaaggagtacaagtgcaaggtctccaacaaagccctcggcgcccccatcgagaaaaccatctccaaagccaaagggcagccccgagaaccacaggtgtacaccctgcccccatgccgggatgagctgaccaagaaccaggtcagcctgtggtgcctggtcaaaggcttctatcccagcgacatcgccgtggagtgggagagcaatgggcagccggagaacaactacaagaccacgcctcccgtgctggactccgacggctccttcttcctctacagcaagctcaccgtggacaagagcaggtggcagcaggggaacgtcttctcatgctccgtgatgcatgaggctctgcacaaccactacacgcagaagagcctctccctgtctccgggtaaa

SEQ ID NO: 368 - DNA, 1335 bp, Artificial Sequence
  DP47 GS (VH-CH1) - Fc(hole) P329GLALA
gaggtgcaattgttggagtctgggggaggcttggtacagcctggggggtccctgagactctcctgtgcagcctccggattcacctttagcagttatgccatgagctgggtccgccaggctccagggaaggggctggagtgggtctcagctattagtggtagtggtggtagcacatactacgcagactccgtgaagggccggttcaccatctccagagacaattccaagaacacgctgtatctgcagatgaacagcctgagagccgaggacacggccgtatattactgtgcgaaaggcagcggatttgactactggggccaaggaaccctggtcaccgtctcgagtgctagcaccaagggcccctccgtgttccccctggcccccagcagcaagagcaccagcggcggcacagccgctctgggctgcctggtcaaggactacttccccgagcccgtgaccgtgtcctggaacagcggagccctgacctccggcgtgcacaccttccccgccgtgctgcagagttctggcctgtatagcctgagcagcgtggtcaccgtgccttctagcagcctgggcacccagacctacatctgcaacgtgaaccacaagcccagcaacaccaaggtggacaagaaggtggagcccaagagctgcgacaaaactcacacatgcccaccgtgcccagcacctgaagctgcagggggaccgtcagtcttcctcttccccccaaaacccaaggacaccctcatgatctcccggacccctgaggtcacatgcgtggtggtggacgtgagccacgaagaccctgaggtcaagttcaactggtacgtggacggcgtggaggtgcataatgccaagacaaagccgcgggaggagcagtacaacagcacgtaccgtgtggtcagcgtcctcaccgtcctgcaccaggactggctgaatggcaaggagtacaagtgcaaggtctccaacaaagccctcggcgcccccatcgagaaaaccatctccaaagccaaagggcagccccgagaaccacaggtgtgcaccctgcccccatcccgggatgagctgaccaagaaccaggtcagcctctcgtgcgcagtcaaaggcttctatcccagcgacatcgccgtggagtgggagagcaatgggcagccggagaacaactacaagaccacgcctcccgtgctggactccgacggctccttcttcctcgtgagcaagctcaccgtggacaagagcaggtggcagcaggggaacgtcttctcatgctccgtgatgcatgaggctctgcacaaccactacacgcagaagagcctctccctgtctccgggtaaa

SEQ ID NO: 369 - protein, 681 aa, Artificial Sequence
  MCSP M4-3(C1) - CH2527 (VH-CK) - Fc(knob)S228P/L235E
EVQLLESGGGLVQPGGSLRLSCAASGFTFSTYAMNWVRQAPGKGLEWVSRIRSKYNNYATYYADSVKGRFTISRDDSKNTLYLQMNSLRAEDTAVYYCVRHGNFGNSYVSWFAYWGQGTLVTVSSASVAAPSVFIFPPSDEQLKSGTASVVCLLNNFYPREAKVQWKVDNALQSGNSQESVTEQDSKDSTYSLSSTLTLSKADYEKHKVYACEVTHQGLSSPVTKSFNRGECGGGGSGGGGSQVQLQESGPGLVKPSQTLSLTCTVSGGSITSGYYWNWIRQHPGKGLEWIGYITFDGSNNYNPSLKSRVTISRDTSKNQFSLKLSSVTAADTAVYYCADFDYWGQGTLVTVSSASTKGPSVFPLAPCSRSTSESTAALGCLVKDYFPEPVTVSWNSGALTSGVHTFPAVLQSSGLYSLSSVVTVPSSSLGTKTYTCNVDHKPSNTKVDKRVESKYGPPCPPCPAPEFEGGPSVFLFPPKPKDTLMISRTPEVTCVVVDVSQEDPEVQFNWYVDGVEVHNAKTKPREEQFNSTYRVVSVLTVLHQDWLNGKEYKCKVSNKGLPSSIEKTISKAKGQPREPQVYTLPPCQEEMTKNQVSLWCLVKGFYPSDIAVEWESNGQPENNYKTTPPVLDSDGSFFLYSRLTVDKSRWQEGNVFSCSVMHEALHNHYTQKSLSLSLGK

SEQ ID NO: 370 - protein, 439 aa, Artificial Sequence
  M4-3(C1) - Fc(hole)S228P/L235E
QVQLQESGPGLVKPSQTLSLTCTVSGGSITSGYYWNWIRQHPGKGLEWIGYITFDGSNNYNPSLKSRVTISRDTSKNQFSLKLSSVTAADTAVYYCADFDYWGQGTLVTVSSASTKGPSVFPLAPCSRSTSESTAALGCLVKDYFPEPVTVSWNSGALTSGVHTFPAVLQSSGLYSLSSVVTVPSSSLGTKTYTCNVDHKPSNTKVDKRVESKYGPPCPPCPAPEFEGGPSVFLFPPKPKDTLMISRTPEVTCVVVDVSQEDPEVQFNWYVDGVEVHNAKTKPREEQFNSTYRVVSVLTVLHQDWLNGKEYKCKVSNKGLPSSIEKTISKAKGQPREPQVCTLPPSQEEMTKNQVSLSCAVKGFYPSDIAVEWESNGQPENNYKTTPPVLDSDGSFFLVSRLTVDKSRWQEGNVFSCSVMHEALHNHYTQKSLSLSLGK

SEQ ID NO: 371 - protein, 681 aa, Artificial Sequence
  M4-3(C1) - CH2527 (VH-CK) - Fc(knob)S228P/L235E/P239G
EVQLLESGGGLVQPGGSLRLSCAASGFTFSTYAMNWVRQAPGKGLEWVSRIRSKYNNYATYYADSVKGRFTISRDDSKNTLYLQMNSLRAEDTAVYYCVRHGNFGNSYVSWFAYWGQGTLVTVSSASVAAPSVFIFPPSDEQLKSGTASVVCLLNNFYPREAKVQWKVDNALQSGNSQESVTEQDSKDSTYSLSSTLTLSKADYEKHKVYACEVTHQGLSSPVTKSFNRGECGGGGSGGGGSQVQLQESGPGLVKPSQTLSLTCTVSGGSITSGYYWNWIRQHPGKGLEWIGYITFDGSNNYNPSLKSRVTISRDTSKNQFSLKLSSVTAADTAVYYCADFDYWGQGTLVTVSSASTKGPSVFPLAPCSRSTSESTAALGCLVKDYFPEPVTVSWNSGALTSGVHTFPAVLQSSGLYSLSSVVTVPSSSLGTKTYTCNVDHKPSNTKVDKRVESKYGPPCPPCPAPEFEGGPSVFLFPPKPKDTLMISRTPEVTCVVVDVSQEDPEVQFNWYVDGVEVHNAKTKPREEQFNSTYRVVSVLTVLHQDWLNGKEYKCKVSNKGLGSSIEKTISKAKGQPREPQVYTLPPCQEEMTKNQVSLWCLVKGFYPSDIAVEWESNGQPENNYKTTPPVLDSDGSFFLYSRLTVDKSRWQEGNVFSCSVMHEALHNHYTQKSLSLSLGK

SEQ ID NO: 372 - protein, 439 aa, Artificial Sequence
  M4-3(C1) - Fc(hole)S228P/L235E/P239G
QVQLQESGPGLVKPSQTLSLTCTVSGGSITSGYYWNWIRQHPGKGLEWIGYITFDGSNNYNPSLKSRVTISRDTSKNQFSLKLSSVTAADTAVYYCADFDYWGQGTLVTVSSASTKGPSVFPLAPCSRSTSESTAALGCLVKDYFPEPVTVSWNSGALTSGVHTFPAVLQSSGLYSLSSVVTVPSSSLGTKTYTCNVDHKPSNTKVDKRVESKYGPPCPPCPAPEFEGGPSVFLFPPKPKDTLMISRTPEVTCVVVDVSQEDPEVQFNWYVDGVEVHNAKTKPREEQFNSTYRVVSVLTVLHQDWLNGKEYKCKVSNKGLGSSIEKTISKAKGQPREPQVCTLPPSQEEMTKNQVSLSCAVKGFYPSDIAVEWESNGQPENNYKTTPPVLDSDGSFFLVSRLTVDKSRWQEGNVFSCSVMHEALHNHYTQKSLSLSLGK

SEQ ID NO: 373 - DNA, 2043 bp, Artificial Sequence
  MCSP M4-3(C1) - CH2527 (VH-CK) - Fc(knob)S228P/L325E
gaggtgcagctgctggaatctggcggcggactggtgcagcctggcggatctctgagactgagctgtgccgccagcggcttcaccttcagcacctacgccatgaactgggtgcgccaggcccctggcaaaggcctggaatgggtgtcccggatcagaagcaagtacaacaactacgccacctactacgccgacagcgtgaagggccggttcaccatcagccgggacgacagcaagaacaccctgtacctgcagatgaacagcctgcgggccgaggacaccgccgtgtactattgtgtgcggcacggcaacttcggcaacagctatgtgtcttggtttgcctactggggccagggcaccctcgtgaccgtgtcaagcgctagcgtggccgctccctccgtgtttatctttcccccatccgatgaacagctgaaaagcggcaccgcctccgtcgtgtgtctgctgaacaatttttaccctagggaagctaaagtgcagtggaaagtggataacgcactgcagtccggcaactcccaggaatctgtgacagaacaggactccaaggacagcacctactccctgtcctccaccctgacactgtctaaggctgattatgagaaacacaaagtctacgcctgcgaagtcacccatcagggcctgagctcgcccgtcacaaagagcttcaacaggggagagtgtggcggaggcggatccggaggagggggatctcaggtgcaattgcaggaaagcggccctggcctggtcaagcccagccagaccctgagcctgacctgcaccgtgtccggcggcagcatcaccagcggctattattggaactggattcggcagcaccccggcaagggcctggaatggatcggctacatcactttcgacggctctaacaactacaaccccagcctgaagtccagagtgaccatcagccgggacaccagcaagaaccagttcagcctgaagctgtccagcgtgacagccgccgacaccgccgtgtactactgcgccgacttcgactactggggccagggcaccctggtcaccgtgtccagcgctagcaccaagggccccagcgtgttccccctggccccctgtagcagaagcaccagcgagagcacagccgccctgggctgcctggtgaaggactacttccccgagcctgtgacagtgagctggaacagcggagccctgaccagcggcgtgcacaccttccccgccgtgctccagagcagcggcctgtacagcctgagcagcgtggtgacagtgcccagcagcagcctgggcaccaagacctacacctgtaacgtggaccacaagcccagcaacaccaaggtggacaagcgggtggagagcaagtacggccctccctgccccccctgccctgcccctgagttcgagggcggacctagcgtgttcctgttcccccccaagcctaaggacaccctgatgatcagcagaacccccgaggtgacctgtgtggtggtggatgtgagccaggaggaccctgaggtccagttcaactggtacgtggacggcgtggaggtgcacaatgccaagaccaagcccagggaggagcagttcaatagcacctaccgggtggtgtccgtgctgaccgtgctgcaccaggattggctgaacggcaaggaatacaagtgtaaggtgtccaacaagggcctgcctagcagcatcgagaaaaccatcagcaaggccaagggccagcccagagaaccccaggtgtacaccctgcccccttgccaggaagagatgaccaagaaccaggtgtccctgtggtgtctggtgaagggcttctaccccagcgacatcgccgtggagtgggagagcaacggccagcctgagaacaactacaagaccaccccccctgtgctggacagcgatggcagcttcttcctgtacagcaggctgaccgtggacaagagcagatggcaggagggcaacgtctttagctgctccgtgatgcacgaggccctgcacaatcactacacccagaagagcctgagcctgtccctgggcaag

SEQ ID NO: 374 - DNA, 1317 bp, Artificial Sequence
  MCSP M4-3(C1) - Fc(hole)S228P/L325E
caggtgcaattgcaggaaagcggccctggcctggtcaagcccagccagaccctgagcctgacctgcaccgtgtccggcggcagcatcaccagcggctattattggaactggattcggcagcaccccggcaagggcctggaatggatcggctacatcactttcgacggctctaacaactacaaccccagcctgaagtccagagtgaccatcagccgggacaccagcaagaaccagttcagcctgaagctgtccagcgtgacagccgccgacaccgccgtgtactactgcgccgacttcgactactggggccagggcaccctggtcaccgtgtccagcgctagcaccaagggccccagcgtgttccccctggccccctgtagcagaagcaccagcgagagcacagccgccctgggctgcctggtgaaggactacttccccgagcctgtgacagtgagctggaacagcggagccctgaccagcggcgtgcacaccttccccgccgtgctccagagcagcggcctgtacagcctgagcagcgtggtgacagtgcccagcagcagcctgggcaccaagacctacacctgtaacgtggaccacaagcccagcaacaccaaggtggacaagcgggtggagagcaagtacggccctccctgccccccctgccctgcccctgagttcgagggcggacctagcgtgttcctgttcccccccaagcctaaggacaccctgatgatcagcagaacccccgaggtgacctgtgtggtggtggatgtgagccaggaggaccctgaggtccagttcaactggtacgtggacggcgtggaggtgcacaatgccaagaccaagcccagggaggagcagttcaatagcacctaccgggtggtgtccgtgctgaccgtgctgcaccaggattggctgaacggcaaggaatacaagtgtaaggtgtccaacaagggcctgcctagcagcatcgagaaaaccatcagcaaggccaagggccagcccagagaaccccaggtgtgcaccctgccccctagccaggaagagatgaccaagaaccaggtgtccctgagctgtgcggtgaagggcttctaccccagcgacatcgccgtggagtgggagagcaacggccagcctgagaacaactacaagaccaccccccctgtgctggacagcgatggcagcttcttcctggtcagcaggctgaccgtggacaagagcagatggcaggagggcaacgtctttagctgctccgtgatgcacgaggccctgcacaatcactacacccagaagagcctgagcctgtccctgggcaag

SEQ ID NO: 375 - protein, 643 aa, Macaca fascicularis
LSLEGSRTLTVCPGSVQPLSSQTLRASSSAGTDPQLLLYRVVRGPQLGRLFHAQQDSTGEALVNFTQAEVYAGNILYEHEMPTEPFWEAHDTLELQLSSPPARDVAATLAVAVSFEAACPQRPSHLWKNKGLWVPEGQRAKITMAALDASNLLASVPSPQRLEHDVLFQVTQFPSRGQLLVSEEPLHAGQPHFLQSQLAAGQLVYAHGGGGTQQDGFHFRAHLQGPAGATVAGPQTSEAFAITVRDVNERPPQPQASVPLRITRGSRAPISRAQLSVVDPDSAPGEIEYEVQRAPHNGFLSLVGGGPGPVTHFTQADVDSGRLAFVANGSSVAGVFQLSMSDGASPPLPMSLAVDILPSAIEVQLQAPLEVPQALGRSSLSQQQLRVVSDREEPEAAYRLIQGPKYGHLLVGGRPASAFSQLQIDQGEVVFAFTNFSSSHDHFRVLALARGVNASAVVNITVRALLHVWAGGPWPQGATLRLDPTILDAGELANRTGSVPHFRLLEGPRHGRVVRVPRARTEPGGSQLVEQFTQQDLEDGRLGLEVGRPEGRAPSPTGDSLTLELWAQGVPPAVASLDFATEPYNAARPYSVALLSVPEATRMEAGKPESSTPTGEPGPMASSPVPAVAKGGFLGFLEANMFS

SEQ ID NO: 376 - protein, 643 aa, Homo sapiens
LSLKGSQTLTVCPGSVQPLSSQTLRASSSAGTDPQLLLYRVVRGPQLGRLFHAQQDSTGEALVNFTQAEVYAGNILYEHEMPPEPFWEAHDTLELQLSSPPARDVAATLAVAVSFEAACPQHPSHLWKNKGLWVPEGQRARITVAALDASNLLASVPSPQRSEHDVLFQVTQFPSRGQLLVSEEPLHAGQPHFLQSQLAAGQLVYAHGGGGTQQDGFHFRAHLQGPAGASVAGPQTSEAFAITVRDVNERPPQPQASVPLRLTRGSRAPISRAQLSVVDPDSAPGEIEYEVQRAPHNGFLSLVGGGLGPVTRFTQADVDSGRLAFVANGSSVAGIFQLSMSDGASPPLPMSLAVDILPSAIEVQLRAPLEVPQALGRSSLSQQQLRVVSDREEPEAAYRLIQGPQYGHLLVGGRPTSAFSQFQIDQGEVVFAFTNFSSSHDHFRVLALARGVNASAVVNVTVRALLHVWAGGPWPQGATLRLDPTVLDAGELANRTGSVPRFRLLEGPRHGRVVRVPRARTEPGGSQLVEQFTQQDLEDGRLGLEVGRPEGRAPGPAGDSLTLELWAQGVPPAVASLDFATEPYNAARPYSVALLSVPEAARTEAGKPESSTPTGEPGPMASSPEPAVAKGGFLSFLEANMFS

SEQ ID NO: 377 - protein, 428 aa, Artificial Sequence
  NABA-avi-his
QLTTESMPFNVAEGKEVLLLVHNLPQQLFGYSWYKGERVDGNRQIVGYAIGTQQATPGPANSGRETIYPNASLLIQNVTQNDTGFYTLQVIKSDLVNEEATGQFHVYPELPKPSISSNNSNPVEDKDAMAFTCEPETQDTTYLWWINNQSLPVSPRLQLSNGNRTLTLLSVTRNDTGPYECEIQNPVSANRSDPVTLNVTYGPDTPTISPPDSSYLSGANLNLSCHSASNPSPQYSWRINGIPQQHTQVLFIAKITPNNNGTYACFVSNLATGRNNSIVKSITVSALSPVVAKPQIKASKTTVTGDKDSVNLTCSTNDTGISIRWFFKNQSLPSSERMKLSQGNITLSINPVKREDAGTYWCEVFNPISKNQSDPIMLNVNYNALPQENLINVDLEVLFQGPGSGLNDIFEAQKIEWHEARAHHHHHH

SEQ ID NO: 378 - protein, 360 aa, Artificial Sequence [sequence omitted]

SEQ ID NO: 379 - protein, 325 aa, Artificial Sequence
  CD3d stalk-Fc(hole)
FKIPIEELEDRVFVNCNTSITWVEGTVGTLLSDITRLDLGKRILDPRGIYRCNGTDIYKDKESTVQVHYRMCRSEQLYFQGDKTHTCPPCPAPELLGGPSVFLFPPKPKDTLMISRTPEVTCVVVDVSHEDPEVKFNWYVDGVEVHNAKTKPREEQYNSTYRVVSVLTVLHQDWLNGKEYKCKVSNKALPAPIEKTISKAKGQPREPQVCTLPPSRDELTKNQVSLSCAVKGFYPSDIAVEWESNGQPENNYKTTPPVLDSDGSFFLVSKLTVDKSRWQQGNVFSCSVMHEALHNHYTQKSLSLSPGKSGGLNDIFEAQKIEWHE

SEQ ID NO: 380 - protein, 658 aa, Mus musculus
LSLEGTRKLTVCPESVQPLSSQSLSASSSTGADPRHLLYRVVRGPQLGRLLHAQQGSAEEVLVNFTQAEVNAGNILYEHEMSSEPFWEAHDTIGLLLSSPPARDLAATLAVMVSFDAACPQRPSRLWKNKGLWVPEGQRAKITVAALDAANLLASVPASQRSRHDVLFQVTQFPTRGQLLVSEEPLHARRPYFLQSELAAGQLVYAHGGGGTQQDGFRFRAHLQGPTGTSVAGPQTSEAFVITVRDVNERPPQPQASIPLRVTRGSRAPVSRAQLSVVDPDSAPGEIEYEVQRAPHNGFLSLAGDNTGPVTHFTQADVDAGRLAFVANGSSVAGVFQLSMSDGASPPIPMSLAVDVLPSTIEVQLRAPLEVPQALGRTSLSRQQLQVISDREEPDVAYRLTQGPLYGQLLVGGQPASAFSQLQVDQGDVVFVFTNFSSSQDHFKVVALARGVNASATVNVTVQALLHVWAGGPWPQGTTLRLDPTVLDASELANRTGSMPHFRLLAGPRYGRVVRVSQGRTESRSNQLVEHFTQRDLEEGQLGLEVGKPEGRSTGPAGDRLTLELWAKGVPPAVALLDFATEPYHAAKSYSVALLSVPEAVRTETEKPGRSVPTGQPGQAASSPVPTAAKGGVDGLNDIFEAQKIEWHEARAHHHHHH

1. A T cell activating bispecific antigen binding molecule comprising a first and a second antigen binding moiety, one of which is a Fab molecule capable of specific binding to an activating T cell antigen and the other one of which is a Fab molecule capable of specific binding to a target cell antigen, and an IgG₄ Fc domain composed of a first and a second subunit capable of stable association;
wherein the first antigen binding moiety is
(a) a single chain Fab molecule wherein the Fab light chain and the Fab heavy chain are connected by a peptide linker, or
(b) a crossover Fab molecule wherein either the variable or the constant regions of the Fab light chain and the Fab heavy chain are exchanged.

2. The T cell activating bispecific antigen binding molecule of claim 1, comprising not more than one antigen binding moiety capable of specific binding to an activating T cell antigen.

3. The T cell activating bispecific antigen binding molecule of claim 1, wherein the first and the second antigen binding moiety are fused to each other, optionally via a peptide linker.

4. The T cell activating bispecific antigen binding molecule of claim 1, wherein the second antigen binding moiety is fused at the C-terminus of the Fab heavy chain to the N-terminus of the Fab heavy chain of the first antigen binding moiety.

5. The T cell activating bispecific antigen binding molecule of claim 1, wherein the first antigen binding moiety is fused at the C-terminus of the Fab heavy chain to the N-terminus of the Fab heavy chain of the second antigen binding moiety.

6. The T cell activating bispecific antigen binding molecule of claim 3, wherein the first antigen binding moiety is a crossover Fab molecule and the Fab light chain of the first antigen binding moiety and the Fab light chain of the second antigen binding moiety are fused to each other, optionally via a peptide linker.

7. The T cell activating bispecific antigen binding molecule claim 1, wherein the second antigen binding moiety of the T cell activating bispecific antigen binding molecule is fused at the C-terminus of the Fab light chain to the N-terminus of the Fab light chain of the first antigen binding moiety.

8. The T cell activating bispecific antigen binding molecule of claim 1, wherein the second antigen binding moiety of the T cell activating bispecific antigen binding molecule is fused at the C-terminus of the Fab heavy chain to the N-terminus of the first or the second subunit of the Fc domain.

9. The T cell activating bispecific antigen binding molecule of claim 1, wherein the first antigen binding moiety is fused at the C-terminus of the Fab heavy chain to the N-terminus of the first or second subunit of the Fc domain.

10. The T cell activating bispecific antigen binding molecule of claim 1, wherein the first and the second antigen binding moiety are each fused at the C-terminus of the Fab heavy chain to the N-terminus of one of the subunits of the Fc domain.

11. The T cell activating bispecific antigen binding molecule of claim 1, comprising a third antigen binding moiety which is a Fab molecule capable of specific binding to a target cell antigen.

12. The T cell activating bispecific antigen binding molecule of claim 11, wherein the third antigen binding moiety is fused at the C-terminus of the Fab heavy chain to the N-terminus of the first or second subunit of the Fc domain.

13. The T cell activating bispecific antigen binding molecule of claim 11, wherein the second and the third antigen binding moiety are each fused at the C-terminus of the Fab heavy chain to the N-terminus of one of the subunits of the Fc domain, and the first antigen binding moiety is fused at the C-terminus of the Fab heavy chain to the N-terminus of the Fab heavy chain of the second antigen binding moiety.

14. The T cell activating bispecific antigen binding molecule of claim 11, wherein the first and the third antigen binding moiety are each fused at the C-terminus of the Fab heavy chain to the N-terminus of one of the subunits of the Fc domain, and the second antigen binding moiety is fused at the C-terminus of the Fab heavy chain to the N-terminus of the Fab heavy chain of the first antigen binding moiety.

15. The T cell activating bispecific antigen binding molecule of claim 1 wherein the IgG₄ Fc domain is a human IgG₄ Fc domain.

16. The T cell activating bispecific antigen binding molecule of claim 1 wherein the IgG₄ Fc domain comprises an amino acid substitution at position S228 (Kabat numbering).

17. The T cell activating bispecific antigen binding molecule of claim 16, wherein said amino acid substitution is S228P.

18. The T cell activating bispecific antigen binding molecule of claim 1 wherein the Fc domain comprises a modification promoting the association of the first and the second subunit of the Fc domain.

19. The T cell activating bispecific antigen binding molecule of claim 18, wherein in the CH3 domain of the first subunit of the Fc domain an amino acid residue is replaced with an amino acid residue having a larger side chain volume, thereby generating a protuberance within the CH3 domain of the first subunit which is positionable in a cavity within the CH3 domain of the second subunit, and in the CH3 domain of the second subunit of the Fc domain an amino acid residue is replaced with an amino acid residue having a smaller side chain volume, thereby generating a cavity within the CH3 domain of the second subunit within which the protuberance within the CH3 domain of the first subunit is positionable.

20. The T cell activating bispecific antigen binding molecule of claim 1 wherein the Fc domain exhibits reduced binding affinity to an Fc receptor and/or reduced effector function, as compared to a native IgG₄ Fc domain.

21. The T cell activating bispecific antigen binding molecule of claim 1 wherein the Fc domain comprises one or more amino acid substitution that reduces binding to an Fc receptor and/or effector function.

22. The T cell activating bispecific antigen binding molecule of claim 21, wherein said one or more amino acid substitution is at one or more position selected from the group of L235 and P329 (Kabat numbering).

23. The T cell activating bispecific antigen binding molecule of claim 22, wherein said amino acid substitution at position L235 is L235E and said amino acid substitution at position P329 is P329G.

24. The T cell activating bispecific antigen binding molecule of claim 1 wherein each subunit of the IgG₄ Fc domain comprises the amino acid substitutions L235E and S228P.

25. The T cell activating bispecific antigen binding molecule of claim 24 wherein each subunit of the IgG₄ Fc domain comprises the amino acid substitutions L235E, S228P and P329G.

26. The T cell activating bispecific antigen binding molecule of claim 21, wherein the Fc receptor is an Fcγ receptor.

27. The T cell activating bispecific antigen binding molecule of claim 21, wherein the effector function is antibody-dependent cell-mediated cytotoxicity (ADCC).

28. The T cell activating bispecific antigen binding molecule of claim 1 wherein the activating T cell antigen is CD3.

29. The T cell activating bispecific antigen binding molecule of claim 28, wherein the first antigen binding moiety comprises the heavy chain CDR1 of SEQ ID NO: 270, the heavy chain CDR2 of SEQ ID NO: 271, the heavy chain CDR3 of SEQ ID NO: 272, the light chain CDR1 of SEQ ID NO: 274, the light chain CDR2 of SEQ ID NO: 275, and the light chain CDR3 of SEQ ID NO: 276.

30. The T cell activating bispecific antigen binding molecule of claim 28, wherein the first antigen binding moiety comprises a heavy chain variable region sequence that is at least about 95%, 96%, 97%, 98%, 99% or 100% identical to SEQ ID NO: 269 and a light chain variable region sequence that is at least about 95%, 96%, 97%, 98%, 99% or 100% identical to SEQ ID NO: 273.

31. The T cell activating bispecific antigen binding molecule of claim 1 wherein the target cell antigen is selected from the group consisting of: Melanoma-associated Chondroitin Sulfate Proteoglycan (MCSP), Epidermal Growth Factor Receptor (EGFR), CD19, CD20, CD33, Carcinoembryonic Antigen (CEA) and Fibroblast Activation Protein (FAP).

32. The T cell activating bispecific antigen binding molecule of claim 1 wherein the target cell antigen is Carcinoembryonic Antigen (CEA).

33. The T cell activating bispecific antigen binding molecule of claim 32, wherein the second antigen binding moiety comprises the heavy chain CDR1 of SEQ ID NO: 290, the heavy chain CDR2 of SEQ ID NO: 291, the heavy chain CDR3 of SEQ ID NO: 292, the light chain CDR1 of SEQ ID NO: 294, the light chain CDR2 of SEQ ID NO: 295 and the light chain CDR3 of SEQ ID NO: 296.

34. The T cell activating bispecific antigen binding molecule of claim 32, wherein the second antigen binding moiety comprises a heavy chain variable region sequence that is at least about 95%, 96%, 97%, 98%, 99% or 100% identical to the amino acid sequence of SEQ ID NO: 289 and a light chain variable region sequence that is at least about 95%, 96%, 97%, 98%, 99% or 100% identical to the amino acid sequence of SEQ ID NO: 293.

35. The T cell activating bispecific antigen binding molecule of claim 1, wherein the target cell antigen is Melanoma-associated Chondroitin Sulfate Proteoglycan (MCSP).

36. The T cell activating bispecific antigen binding molecule of claim 35, wherein the second antigen binding moiety comprises the heavy chain CDR1 of SEQ ID NO: 280, the heavy chain CDR2 of SEQ ID NO: 281, the heavy chain CDR3 of SEQ ID NO: 282, the light chain CDR1 of SEQ ID NO: 284, the light chain CDR2 of SEQ ID NO: 285 and the light chain CDR3 of SEQ ID NO: 286.

37. The T cell activating bispecific antigen binding molecule of claim 35, wherein the second antigen binding moiety comprises a heavy chain variable region sequence that is at least about 95%, 96%, 97%, 98%, 99% or 100% identical to the amino acid sequence of SEQ ID NO: 279 and a light chain variable region sequence that is at least about 95%, 96%, 97%, 98%, 99% or 100% identical to the amino acid sequence of SEQ ID NO: 283.

38. A T cell activating bispecific antigen binding molecule comprising a first antigen binding moiety capable of specific binding to CD3, a second antigen binding moiety capable of binding to MCSP, and an IgG₄ Fc domain, wherein the antigen binding molecule comprises the amino acid sequences of SEQ ID NOs 278, 319, 369 and 370.

39. A T cell activating bispecific antigen binding molecule comprising a first antigen binding moiety capable of specific binding to CD3, a second antigen binding moiety capable of binding to MCSP, and an IgG₄ Fc domain, wherein the antigen binding molecule comprises the amino acid sequences of SEQ ID NOs 278, 319, 371 and 372.

40. An isolated polynucleotide encoding the T cell activating bispecific antigen binding molecule of claim 1 or a fragment thereof.

41. An isolated polynucleotide encoding the T cell activating bispecific antigen binding molecule of claim 38 or a fragment thereof.

42. An isolated polynucleotide encoding the T cell activating bispecific antigen binding molecule of claim 39 or a fragment thereof.

43. A polypeptide encoded by the isolated polynucleotide of claim 40.

44. A vector, particularly an expression vector, comprising the isolated polynucleotide of claim 40.

45. A host cell comprising the expression vector of claim 44.

46. A method of producing a T cell activating bispecific antigen binding molecule, comprising the steps of a) culturing the host cell of claim 45 under conditions suitable for the expression of the T cell activating bispecific antigen binding molecule and b) recovering the T cell activating bispecific antigen binding molecule.

47. A T cell activating bispecific antigen binding molecule produced by the method of claim 46.

48. A pharmaceutical composition comprising the T cell activating bispecific antigen binding molecule of claim 1 and a pharmaceutically acceptable carrier.

49. A pharmaceutical composition comprising the T cell activating bispecific antigen binding molecule of claim 38 and a pharmaceutically acceptable carrier.

50. A pharmaceutical composition comprising the T cell activating bispecific antigen binding molecule of claim 39 and a pharmaceutically acceptable carrier.

51. A pharmaceutical composition comprising the T cell activating bispecific antigen binding molecule of claim 47 and a pharmaceutically acceptable carrier.

52. The T cell activating bispecific antigen binding molecule of claim 1 for use as a medicament.

53. The T cell activating bispecific antigen binding molecule of claim 38 for use as a medicament.

54. The T cell activating bispecific antigen binding molecule of claim 39 for use as a medicament

55. The T cell activating bispecific antigen binding molecule of claim 47 for use as a medicament

56. The T cell activating bispecific antigen binding molecule of claim 1 for use in the treatment of a disease in an individual in need thereof.

57. The T cell activating bispecific antigen binding molecule of claim 56, wherein the disease is cancer.

58. The T cell activating bispecific antigen binding molecule of claim 38 for use in the treatment of a disease in an individual in need thereof.

59. The T cell activating bispecific antigen binding molecule of claim 39 for use in the treatment of a disease in an individual in need thereof.

60. The T cell activating bispecific antigen binding molecule of claim 47 for use in the treatment of a disease in an individual in need thereof.

61. A method of treating a disease in an individual, comprising administering to said individual a therapeutically effective amount of a composition comprising the T cell activating bispecific antigen binding molecule of claim 1 in a pharmaceutically acceptable form.

62. The method of claim 61, wherein said disease is cancer.

63. A method of treating a disease in an individual, comprising administering to said individual a therapeutically effective amount of a composition comprising the T cell activating bispecific antigen binding molecule of claim 38 in a pharmaceutically acceptable form.

64. A method of treating a disease in an individual, comprising administering to said individual a therapeutically effective amount of a composition comprising the T cell activating bispecific antigen binding molecule of claim 39 in a pharmaceutically acceptable form.

65. A method of treating a disease in an individual, comprising administering to said individual a therapeutically effective amount of a composition comprising the T cell activating bispecific antigen binding molecule of claim 47 in a pharmaceutically acceptable form.

66. A method for inducing lysis of a target cell, comprising contacting a target cell with the T cell activating bispecific antigen binding molecule of claim 1 in the presence of a T cell.

67. A method for inducing lysis of a target cell, comprising contacting a target cell with the T cell activating bispecific antigen binding molecule of claim 38 in the presence of a T cell.

68. A method for inducing lysis of a target cell, comprising contacting a target cell with the T cell activating bispecific antigen binding molecule of claim 39 in the presence of a T cell.

69. A method for inducing lysis of a target cell, comprising contacting a target cell with the T cell activating bispecific antigen binding molecule of claim 47 in the presence of a T cell.

70. A host cell comprising the isolated polynucleotide of claim 40.
